(19) United States
(12) Patent Application Publication
(10) Pub. No.: US 2008/0004206 A1
(43) Pub. Date: Jan. 3, 2008

(54) Albumin fusion proteins

(76) Inventors: Craig A. Rosen, Laytonsville, MD (US); Adam Bell, Germantown, MD (US); Paul A. Moore, North Bethesda, MD (US); Yanggu Shi, Gaithersburg, MD (US); David W. LaFleur, Washington, DC (US); Jason B. Bock, North Potomac, MD (US); Michael W. Laird, San Ramon, CA (US); William A. Haseltine, Washington, DC (US); Douglas B. Woods, Gaithersburg, MD (US); Mani Subramanian, Ellicott City, MD (US)

Correspondence Address: FINNEGAN, HENDERSON, FARABOW, GARRETT & DUNNER;LLP, 901 NEW YORK AVENUE, NW, WASHINGTON, DC, 20001-4413, US

(21) Appl. No.: 11/495,624

(22) Filed: Jul. 31, 2006

Related U.S. Application Data
(63) Continuation-in-part of application No. PCT/US05/04041, filed on Feb. 9, 2005.
(63) Continuation-in-part of application No. 11/175,690, filed on Jul. 7, 2005.
Application No. 11/175,690 is a continuation of application No. PCT/US04/01369, filed on Jan. 20, 2004.
(63) Continuation-in-part of application No. 11/429,276, filed on May 8, 2006.
Application No. 11/429,276 is a continuation of application No. 10/775,204, filed on Feb. 11, 2004, now Pat. No. 7,141,547.
Application No. 10/775,204 is a continuation of application No. PCT/US02/40891, filed on Dec. 23, 2002.
(60) Provisional application No. 60/707,521, filed on Aug. 12, 2005.
(60) Provisional application No. 60/712,386, filed on Aug. 31, 2005.
(60) Provisional application No. 60/732,724, filed on Nov. 3, 2005.
(60) Provisional application No. 60/776,914, filed on Feb. 28, 2006.
(60) Provisional application No. 60/781,361, filed on Mar. 13, 2006.
(60) Provisional application No. 60/810,182, filed on Jun. 2, 2006.
(60) Provisional application No. 60/813,682, filed on Jun. 15, 2006.
(60) Provisional application No. 60/542,274, filed on Feb. 9, 2004.
(60) Provisional application No. 60/549,901, filed on Mar. 5, 2004.
(60) Provisional application No. 60/556,906, filed on Mar. 29, 2004.
(60) Provisional application No. 60/636,603, filed on Dec. 17, 2004.
(60) Provisional application No. 60/441,305, filed on Jan. 22, 2003.
(60) Provisional application No. 60/453,201, filed on Mar. 11, 2003.
(60) Provisional application No. 60/467,222, filed on May 2, 2003.
(60) Provisional application No. 60/472,816, filed on May 23, 2003.
(60) Provisional application No. 60/476,267, filed on Jun. 6, 2003.
(60) Provisional application No. 60/505,172, filed on Sep. 24, 2003.
(60) Provisional application No. 60/506,746, filed on Sep. 30, 2003.
(60) Provisional application No. 60/341,811, filed on Dec. 21, 2001.
(60) Provisional application No. 60/350,358, filed on Jan. 24, 2002.
(60) Provisional application No. 60/351,360, filed on Jan. 28, 2002.
(60) Provisional application No. 60/359,370, filed on Feb. 26, 2002.
(60) Provisional application No. 60/360,000, filed on Feb. 28, 2002.
(60) Provisional application No. 60/367,500, filed on Mar. 27, 2002.
(60) Provisional application No. 60/370,227, filed on Apr. 8, 2002.
(60) Provisional application No. 60/378,950, filed on May 10, 2002.
(60) Provisional application No. 60/382,617, filed on May 24, 2002.
(60) Provisional application No. 60/383,123, filed on May 28, 2002.
(60) Provisional application No. 60/385,708, filed on Jun. 5, 2002.
(60) Provisional application No. 60/394,625, filed on Jul. 10, 2002.
(60) Provisional application No. 60/398,008, filed on Jul. 24, 2002.
(60) Provisional application No. 60/402,131, filed on Aug. 9, 2002.
(60) Provisional application No. 60/402,708, filed on Aug. 13, 2002.
(60) Provisional application No. 60/411,355, filed on Sep. 18, 2002.
(60) Provisional application No. 60/411,426, filed on Sep. 18, 2002.
(60) Provisional application No. 60/414,984, filed on Oct. 2, 2002.
(60) Provisional application No. 60/417,611, filed on Oct. 11, 2002.
(60) Provisional application No. 60/420,246, filed on Oct. 23, 2002.
(60) Provisional application No. 60/423,623, filed on Nov. 5, 2002.

(51) Int. Cl. A61K 38/38; C07H 21/04; C07K 14/76; C12N 15/00; C12N 5/00

(52) U.S. Cl. 514/2; 435/252.1; 435/255.1; 435/320.1; 435/325; 530/362; 536/23.1

(57) ABSTRACT

The present invention encompasses albumin fusion proteins. Nucleic acid molecules encoding the albumin fusion proteins of the invention are also encompassed by the invention, as are vectors containing these nucleic acids, host cells transformed with these nucleic acids vectors, and methods of making the albumin fusion proteins of the invention and using these nucleic acids, vectors, and/or host cells. Additionally the present invention encompasses pharmaceutical compositions comprising albumin fusion proteins and methods of treating, preventing, or ameliorating diseases, disorders or conditions using albumin fusion proteins of the invention.

### CROSS-REFERENCE TO RELATED APPLICATIONS

[0001] This application claims benefit under 35 U.S.C. § 119(e) of U.S. Provisional Application Nos. 60/707,521, filed Aug. 12, 2005; 60/712,386, filed Aug. 31, 2005; 60/732,724, filed Nov. 3, 2005; 60/776,914, filed Feb. 28, 2006; 60/781,361, filed Mar. 13, 2006; 60/810,182, filed Jun. 2, 2006; and 60/813,682, filed Jun. 15, 2006. This application is also a continuation-in-part of International Application No. PCT/US2005/004041, filed Feb. 9, 2005, which claims benefit under 119(e) of U.S. Provisional Application Nos. 60/542,274, filed Feb. 9, 2004, 60/549,901, filed Mar. 5, 2004, 60/556,906, filed Mar. 29, 2004, and 60/636,603, filed Dec. 17, 2004. This application is also a continuation-in-part of U.S. application Ser. No. 11/175,690, filed Jul. 7, 2005, which is a continuation of International Application No. PCT/2004/001369, filed Jan. 20, 2004, which claims benefit under 35 U.S.C. § 119(e) of U.S. Provisional Application Nos. 60/441,305, filed Jan. 22, 2003; 60/453,201, filed Mar. 11, 2003; 60/467,222, filed May 2, 2003; 60/472,816, filed May 23, 2003; 60/476,267, filed Jun. 6, 2003; 60/505,172, filed Sep. 24, 2003; and 60/506,746, filed Sep. 30, 2003. This application is also a continuation-in-part of U.S. application Ser. No. 11/429,276, filed May 8, 2006, which is a continuation of U.S. application Ser. No. 10/775,204, filed Feb. 11, 2004, which is a continuation of International Application No. PCT/US2002/40891, filed Dec. 23, 2002, which claims benefit under 35 U.S.C. § 119(e) U.S. Provisional Application Nos. 60/341,811, filed Dec. 21, 2001; 60/350,358, filed Jan. 24, 2002; 60/351,360, filed Jan. 28, 2002; 60/359,370, filed Feb. 26, 2002; 60/360,000, filed Feb. 28, 2002; 60/367,500, filed Mar. 27, 2002; 60/370,227, filed Apr. 8, 2002; 60/378,950, filed May 10, 2002; 60/382,617, filed May 24, 2002; 60/383,123, filed May 28, 2002; 60/385,708, filed Jun. 5, 2002; 60/394,625, filed Jul. 10, 2002; 60/398,008, filed Jul. 24, 2002; 60/402,131, filed Aug. 9, 2002; 60/402,708, filed Aug. 13, 2002; 60/411,426, filed Sep. 18, 2002; 60/411,355, filed Sep. 18, 2002; 60/414,984, filed Oct. 2, 2002; 60/417,611, filed Oct. 11, 2002; 60/420,246, filed Oct. 23, 2002; and 60/423,623, filed Nov. 5, 2002. All of the above listed applications are incorporated by reference herein in their entireties.

### REFERENCE TO SEQUENCE LISTING ON COMPACT DISC

[0002] This application refers to a “Sequence Listing” listed below, which is provided as an electronic document on three identical compact discs (CD-R), labeled “Copy 1,” “Copy 2,” and “CRF.” These compact discs each contain the file “PF617 Sequence Listing.txt” (1,193,482 bytes, created on Jul. 28, 2006), which is incorporated by reference in its entirety.

### BACKGROUND OF THE INVENTION

[0003] The invention relates generally to Therapeutic proteins (including, but not limited to, at least one polypeptide, antibody, peptide, or fragment and variant thereof) fused to albumin or fragments or variants of albumin. The invention encompasses polynucleotides encoding therapeutic albumin fusion proteins, therapeutic albumin fusion proteins, compositions, pharmaceutical compositions, formulations and kits. Host cells transformed with the polynucleotides encoding therapeutic albumin fusion proteins are also encompassed by the invention, as are methods of making the albumin fusion proteins of the invention using these polynucleotides, and/or host cells.

[0004] Human serum albumin (HSA, or HA), a protein of 585 amino acids in its mature form (as shown in FIG. 1 (SEQ ID NO: 1)), is responsible for a significant proportion of the osmotic pressure of serum and also functions as a carrier of endogenous and exogenous ligands. At present, HA for clinical use is produced by extraction from human blood. The production of recombinant HA (rHA) in microorganisms has been disclosed in EP 330 451 and EP 361 991. Therapeutic proteins in their native state or when recombinantly produced, such as interferons and growth hormones, are typically labile molecules exhibiting short shelf-lives, particularly when formulated in aqueous solutions. The instability in these molecules when formulated for administration dictates that many of the molecules must be lyophilized and refrigerated at all times during storage, thereby rendering the molecules difficult to transport and/or store. Storage problems are particularly acute when pharmaceutical formulations must be stored and dispensed outside of the hospital environment.

[0005] Few practical solutions to the storage problems of labile protein molecules have been proposed. Accordingly, there is a need for stabilized, long lasting formulations of proteinaceous therapeutic molecules that are easily dispensed, preferably with a simple formulation requiring minimal post-storage manipulation.

[0006] Upon in vivo administration, therapeutic proteins in their native state or when recombinantly produced, such as interferons and growth hormones, exhibit a short plasma stability due to rapid clearance from the bloodstream. Accordingly, the therapeutic effects provided by these proteins are also short-lived. Thus, in order to sustain their desired therapeutic effect in vivo, the rapid clearance of these proteins from the blood dictates that the therapeutic molecules must be administered more frequently or at a higher dose. However, increasing the dosing schedule for administration of the therapeutic protein often results in an increase in injection site reactions, side-effects, and toxicity in the patient. Similarly, administration of the therapeutic protein at a higher dose also commonly results in an increase in toxicity and side-effects in the patient.

[0007] The few practical solutions to increasing plasma stability of therapeutic molecules that have been proposed, including chemical conjugation, have provided limited benefit to the patient. Generally, in most cases, these chemically modified therapeutic molecules are still administered on a frequent dosing schedule, retaining significant injection site reactions, side-effects, and toxicity in patients. Accordingly, there is a need for an stabilized form of therapeutic molecules that retains a higher plasma stability in vivo than the native or recombinantly produced therapeutic alone and can be administered less frequently, thereby decreasing potential side-effects to the patient.

### SUMMARY OF THE INVENTION

[0008] The present invention encompasses albumin fusion proteins comprising a Therapeutic protein (e.g., a polypeptide, antibody, or peptide, or fragment or variant thereof) fused to albumin or a fragment (portion) or variant of albumin. The present invention also encompasses polynucleotides comprising, or alternatively consisting of, nucleic acid molecules encoding a Therapeutic protein (e.g., a polypeptide, antibody, or peptide, or fragment or variant thereof) fused to albumin or a fragment (portion) or variant of albumin. The present invention also encompasses polynucleotides, comprising, or alternatively consisting of, nucleic acid molecules encoding proteins comprising a Therapeutic protein (e.g., a polypeptide, antibody, or peptide, or fragment or variant thereof) fused to albumin or a fragment (portion) or variant of albumin, that is sufficient to prolong the shelf life of the Therapeutic protein, to increase the plasma stability of the Therapeutic protein compared to its unfused state, and/or stabilize the Therapeutic protein and/or its activity in solution (or in a pharmaceutical composition) in vitro and/or in vivo. Albumin fusion proteins encoded by a polynucleotide of the invention are also encompassed by the invention, as are host cells transformed with polynucleotides of the invention, and methods of making the albumin fusion proteins of the invention and using these polynucleotides of the invention, and/or host cells.

[0009] In a preferred aspect of the invention, albumin fusion proteins include, but are not limited to, those described in Table 2 and the polynucleotides encoding such proteins.

[0010] The invention also encompasses pharmaceutical formulations comprising an albumin fusion protein of the invention and a pharmaceutically acceptable diluent or carrier. Such formulations may be in a kit or container. Such kit or container may be packaged with instructions pertaining to the extended shelf life of the Therapeutic protein. Such formulations may be used in methods of treating, preventing, ameliorating or diagnosing a disease or disease symptom in a patient, preferably a mammal, most preferably a human, comprising the step of administering the pharmaceutical formulation to the patient.

[0011] In other embodiments, the present invention encompasses methods of preventing, treating, or ameliorating a disease or disorder. In preferred embodiments, the present invention encompasses a method of treating a disease or disorder listed in the “Preferred Indication: Y” column of Table 1 comprising administering to a patient in which such treatment, prevention or amelioration is desired an albumin fusion protein of the invention that comprises a Therapeutic protein or portion corresponding to a Therapeutic protein (or fragment or variant thereof) disclosed in the “Therapeutic Protein: X” column of Table 1 (in the same row as the disease or disorder to be treated as listed in the “Preferred Indication: Y” column of Table 1) in an amount effective to treat, prevent or ameliorate the disease or disorder.

[0012] In one embodiment, an albumin fusion protein described in Table 1 or 2 has extended shelf life.

[0013] In a second embodiment, an albumin fusion protein described in Table 1 or 2 is more stable than the corresponding unfused Therapeutic molecule described in Table 1.

[0014] The present invention further includes transgenic organisms modified to contain the nucleic acid molecules of the invention (including, but not limited to, the polynucleotides described in Tables 1 and 2), preferably modified to express an albumin fusion protein of the invention.

### BRIEF DESCRIPTION OF THE FIGURES

[0015] FIG. 1A-D shows the amino acid sequence of the mature form of human albumin (SEQ ID NO: 1) and a polynucleotide encoding it (SEQ ID NO:2). Nucleotides 1 to 1755 of SEQ ID NO:2 encode the mature form of human albumin (SEQ ID NO:1).

[0016] FIG. 2 shows the restriction map of the pPPC0005 cloning vector ATCC deposit PTA-3278.

[0017] FIG. 3 shows the restriction map of the pSAC35 yeast S. cerevisiae expression vector (Sleep et al., BioTechnology 8:42 (1990)).

[0018] FIG. 4 compares the anti-proliferative activity of IFN albumin fusion protein encoded by CID 3165 (CID 3165 protein) and recombinant IFNa (rIFNa) on Hs294T melanoma cells. The cells were cultured with varying concentrations of either CID 3165 protein or rIFNa and proliferation was measured by BrdU incorporation after 3 days of culture. CID 3165 protein caused measurable inhibition of cell proliferation at concentrations above 10 ng/ml with 50% inhibition achieved at approximately 200 ng/ml. (▪)=CID 3165 protein, (♦)=rIFNa.

[0019] FIG. 5 shows the effect of various dilutions of IFNa albumin fusion proteins on SEAP activity in the ISRE-SEAP/293F reporter cells. One preparation of IFNa fused upstream of albumin (♦) was tested, as well as two different preparations of IFNa fused downstream of albumin (●) and (▪).

[0020] FIG. 6 shows the effect of time and dose of IFNa albumin fusion protein encoded by DNA comprised in construct 2249 (CID 2249 protein) on the mRNA level of OAS (p41) in treated monkeys (see Example 76). Per time point: first bar=Vehicle control, 2^{nd} bar=30 ug/kg CID 2249 protein day 1 iv, third bar=30 ug/kg CID 2249 protein day 1 sc, 4^{th} bar=300 ug/kg CID 2249 protein day 1 sc, 5^{th} bar=40 ug/kg recombinant IFNa day 1, 3 and 5 sc.

[0021] FIG. 7 shows the dose-response relationship of BNP albumin fusion proteins encoded by DNA comprised in constructs CID 3691 and 3618 (CID 3691 and 3618 protein) on activating cGMP formation in NPR-A/293F reporter cells (see Examples 78 and 79). Both BNP peptide (▪), as well as, two different preparations of BNP fused upstream of albumin (□) and (●) were tested.

[0022] FIG. 8 shows the effect of BNP albumin fusion protein on mean arterial pressure in spontaneously hypertensive rats (see Example 78). Vehicle (□), BNP peptide (●), or BNP albumin fusion protein (◯) were delivered via tail vein injection. Systolic and diastolic blood pressures were recorded by cuff-tail method.

[0023] FIG. 9 shows the plasma cGMP levels in eleven- to 12-week-old male C57/BL6 mice after intravenous injection of recombinant BNP peptide (●) or BNP albumin fusion protein (◯ (see Example 78). cGMP levels were determined from plasma prepared from tail bleeds collected at several time points after intravenous injection.

[0024] FIG. 10 shows the dose-response relationship of BNP peptide and BNP albumin fusion proteins encoded by DNA comprised in constructs CID 3796 and 3959 on activating cGMP formation in NPR-A/293F reporter cells (see Example 80). Both BNP peptide (▪), as well as, two different preparations comprising BNP fused downstream of albumin, (□) and (⋄) were tested.

[0025] FIG. 11A shows the dose-response relationship of BNP and ANP peptides with or without treatment of neprilysin for 24 hours on activating cGMP formation in NPR-A/293F reporter cells (see Example 81).

[0026] FIG. 11B shows the dose-response relationship of ANP peptide on activating cGMP formation in NPR-A/293F reporter cells following treatment of neprilysin or control MES buffer for 20 minutes, 1 hour, or 24 hours (see Example 81).

[0027] FIG. 11C shows the dose-response relationship of ANP albumin fusion protein comprising ANP fused upstream of albumin and encoded by DNA comprised in construct CID 3484 on activating cGMP formation in NPR-A/293F reporter cells following treatment of neprilysin or control MES buffer for 20 minutes, 1 hour, or 24 hours (see Example 81).

[0028] FIG. 11D shows the percentage of intact natriuretic peptides following treatment with neprilysin for the specified time. Both ANP and BNP peptides, as well as, two albumin fusion proteins comprising BNP fused upstream of albumin via tripartite glycines (CID 3809) and ANP fused upstream to albumin (CID 3484) were tested (see Example 81).

[0029] FIG. 12 shows the reduction in HCV RNA titer, as measured by median HCV RNA change (log₁₀ IU/ml), in patients infected with chronic hepatitis C genotype 1 and who have previously failed to respond to at least one treatment regimen of pegylated interferon alpha in combination with ribavirin (PEG-RBV) (nonresponders) following treatment with HSA-IFNα2b in combination with ribavirin for 0 to 24 weeks.

[0030] FIGS. 13A and B show the effect of HSA-BNP (Construct ID #3959) on plasma and urine cGMP levels, respectively following administration of an 5 mg/kg IV bolus in normal healthy pigs (n=4-6/group). Asterisks indicate significant differences in cGMP levels from vehicle (p<0.05).

[0031] FIG. 14A shows the effect of administration of an intravenous bolus of 2 mg/kg or 6 mg/kg HSA-BNP (Construct ID #3959) on end-diastolic diameter change in a porcine experimental heart failure model (n=10/group). Heart failure was induced in the pig by ventricular pacing. End diastolic diameter was measure by echocardiography. Significant changes (p<0.05) from vehicle or baseline are indicated (& and #, respectively).

[0032] FIG. 14B shows the effect of administration of an intravenous bolus of 2 mg/kg or 6 mg/kg HSA-BNP (Construct ID #3959) on fractional shortening in a porcine experimental heart failure model (n=10/group). Heart failure was induced in the pig by ventricular pacing. Significant changes (p<0.05) from vehicle or baseline are indicated (& and #, respectively).

[0033] FIGS. 15A-H show the hemodynamic effects of HSA-BNP (Construct ID #3959) administered via a single intravenous bolus at 0.5 mg/kg or 5 mg/kg in a normal dog model. Cardiac output (CO), mean arterial pressure (MAP), pulmonary capillary wedge pressure (PCWP) and pulmonary arterial pressure (PAP) were measured at baseline prior to intravenous bolus of 0.5 mg/kg or 5 mg/kg HSA-BNP (Construct ID #3959) and at 30, 60, 90, 150, 210, and 270 post-infusion in anesthetized normal mongrels (n=8/group). Asterisks indicate statistically significant changes from baseline (p<0.05).

[0034] FIGS. 16A-H show the renal effects of HSA-BNP (Construct ID #3959) administered via a single intravenous bolus at 0.5 mg/kg or 5 mg/kg in a normal dog model. Urine flow (rate/30 minute collection), sodium excretion, renal blood flow, and glomerular filtration rate (GFR) were measured at baseline prior to intravenous bolus of 0.5 mg/kg or 5 mg/kg HSA-BNP (Construct ID #3959) and at 30, 60, 90, 150, 210, and 270 post-infusion in anesthetized normal mongrels (n=8/group). Asterisks indicate statistically significant changes from baseline (p<0.05).

[0035] FIGS. 17A-F show the hormonal effects of HSA-BNP (Construct ID #3959) administered via a single intravenous bolus at 0.5 mg/kg or 5 mg/kg in a normal dog model. Plasma aldosterone, renin, and angiotensin II levels were measured at baseline prior to intravenous bolus of 0.5 mg/kg or 5 mg/kg HSA-BNP (Construct ID #3959) and at 30, 60, 90, 150, 210, and 270 post-infusion in anesthetized normal mongrels (n=8/group). Asterisks indicate statistically significant changes from baseline (p<0.05).

[0036] FIGS. 18A-C show the effect of a single intravenous bolus of 5 mg/kg HSA-BNP (Construct ID #3959) on systolic and mean arterial blood pressure in normal, healthy, awake beagles surgically implanted with a Data Sciences International radiotelemetry transmitter, which had systemic arterial blood pressure, heart rate and ECG data collection capabilities. Change from baseline of systolic blood pressure (FIG. 18A), difference in mean systolic blood pressure (FIG. 18B), and change from baseline in mean arterial pressures (FIG. 18C) over 48 hours of continuous data recording following infusion are presented. Asterisks indicate a statistically significant difference in baseline-adjusted mean values for 5 mg/kg HSA-BNP (Construct ID #3959) compared to vehicle (p<0.05).

[0037] FIGS. 19A and B show a comparison of the effect of an intravenous bolus of 0.02 mg/kg unfused BNP peptide and a subcutaneous injection of 10 mg/kg HSA-BNP (Construct ID #3959) on systemic blood pressure in normal, healthy, awake beagles surgically implanted with a Data Sciences International radiotelemetry transmitter, which had systemic arterial blood pressure, heart rate and ECG data collection capabilities. Change from baseline of systolic blood pressure over 48 hours of continuous data recording following administration of BNP (FIG. 19A) and HSA-BNP (Construct ID #3959) are presented. Asterisks indicate a statistically significant difference in baseline-adjusted mean values for 5 mg/kg HSA-BNP (Construct ID #3959) compared to vehicle (p<0.05).

### DETAILED DESCRIPTION

[0038] Definitions

[0039] The following definitions are provided to facilitate understanding of certain terms used throughout this specification.

[0040] As used herein, “polynucleotide” refers to a nucleic acid molecule having a nucleotide sequence encoding a fusion protein comprising, or alternatively consisting of, at least one molecule of albumin (or a fragment or variant thereof) joined in frame to at least one Therapeutic protein X (or fragment or variant thereof); a nucleic acid molecule having a nucleotide sequence encoding a fusion protein comprising, or alternatively consisting of, the amino acid sequence of SEQ ID NO:Y (as described in column 6 of Table 2) or a fragment or variant thereof; a nucleic acid molecule having a nucleotide sequence comprising or alternatively consisting of the sequence shown in SEQ ID NO:X; a nucleic acid molecule having a nucleotide sequence encoding a fusion protein comprising, or alternatively consisting of, the amino acid sequence of SEQ ID NO:Z; a nucleic acid molecule having a nucleotide sequence encoding an albumin fusion protein of the invention generated as described in Table 2 or in the Examples; a nucleic acid molecule having a nucleotide sequence encoding a Therapeutic albumin fusion protein of the invention, a nucleic acid molecule having a nucleotide sequence contained in an albumin fusion construct described in Table 2, or a nucleic acid molecule having a nucleotide sequence contained in an albumin fusion construct deposited with the ATCC (as described in Table 3).

[0041] As used herein, “albumin fusion construct” refers to a nucleic acid molecule comprising, or alternatively consisting of, a polynucleotide encoding at least one molecule of albumin (or a fragment or variant thereof) joined in frame to at least one polynucleotide encoding at least one molecule of a Therapeutic protein (or fragment or variant thereof); a nucleic acid molecule comprising, or alternatively consisting of, a polynucleotide encoding at least one molecule of albumin (or a fragment or variant thereof) joined in frame to at least one polynucleotide encoding at least one molecule of a Therapeutic protein (or fragment or variant thereof) generated as described in Table 2 or in the Examples; or a nucleic acid molecule comprising, or alternatively consisting of, a polynucleotide encoding at least one molecule of albumin (or a fragment or variant thereof) joined in frame to at least one polynucleotide encoding at least one molecule of a Therapeutic protein (or fragment or variant thereof), further comprising, for example, one or more of the following elements: (1) a functional self-replicating vector (including but not limited to, a shuttle vector, an expression vector, an integration vector, and/or a replication system), (2) a region for initiation of transcription (e.g., a promoter region, such as for example, a regulatable or inducible promoter, a constitutive promoter), (3) a region for termination of transcription, (4) a leader sequence, and (5) a selectable marker. The polynucleotide encoding the Therapeutic protein and albumin protein, once part of the albumin fusion construct, may each be referred to as a “portion,” “region” or “moiety” of the albumin fusion construct.

[0042] The present invention relates generally to polynucleotides encoding albumin fusion proteins; albumin fusion proteins; and methods of treating, preventing, or ameliorating diseases or disorders using albumin fusion proteins or polynucleotides encoding albumin fusion proteins. As used herein, “albumin fusion protein” refers to a protein formed by the fusion of at least one molecule of albumin (or a fragment or variant thereof) to at least one molecule of a Therapeutic protein (or fragment or variant thereof). An albumin fusion protein of the invention comprises at least a fragment or variant of a Therapeutic protein and at least a fragment or variant of human serum albumin, which are associated with one another by genetic fusion (i.e., the albumin fusion protein is generated by translation of a nucleic acid in which a polynucleotide encoding all or a portion of a Therapeutic protein is joined in-frame with a polynucleotide encoding all or a portion of albumin). The Therapeutic protein and albumin protein, once part of the albumin fusion protein, may each be referred to as a “portion”, “region” or “moiety” of the albumin fusion protein (e.g., a “Therapeutic protein portion” or an “albumin protein portion”). In a highly preferred embodiment, an albumin fusion protein of the invention comprises at least one molecule of a Therapeutic protein X or fragment or variant of thereof (including, but not limited to a mature form of the Therapeutic protein X) and at least one molecule of albumin or fragment or variant thereof (including but not limited to a mature form of albumin).

[0043] In a further preferred embodiment, an albumin fusion protein of the invention is processed by a host cell and secreted into the surrounding culture medium. Processing of the nascent albumin fusion protein that occurs in the secretory pathways of the host used for expression may include, but is not limited to signal peptide cleavage; formation of disulfide bonds; proper folding; addition and processing of carbohydrates (such as for example, N— and O— linked glycosylation); specific proteolytic cleavages; and assembly into multimeric proteins. An albumin fusion protein of the invention is preferably in the processed form. In a most preferred embodiment, the “processed form of an albumin fusion protein” refers to an albumin fusion protein product which has undergone N-terminal signal peptide cleavage, herein also referred to as a “mature albumin fusion protein”.

[0044] In several instances, a representative clone containing an albumin fusion construct of the invention was deposited with the American Type Culture Collection (herein referred to as “ATCC®”). Furthermore, it is possible to retrieve a given albumin fusion construct from the deposit by techniques known in the art and described elsewhere herein. The ATCC® is located at 10801 University Boulevard, Manassas, Va. 20110-2209, USA. The ATCC® deposits were made pursuant to the terms of the Budapest Treaty on the international recognition of the deposit of microorganisms for the purposes of patent procedure.

[0045] In one embodiment, the invention provides a polynucleotide encoding an albumin fusion protein comprising, or alternatively consisting of, a Therapeutic protein and a serum albumin protein. In a further embodiment, the invention provides an albumin fusion protein comprising, or alternatively consisting of, a Therapeutic protein and a serum albumin protein. In a preferred embodiment, the invention provides an albumin fusion protein comprising, or alternatively consisting of, a Therapeutic protein and a serum albumin protein encoded by a polynucleotide described in Table 2. In a further preferred embodiment, the invention provides a polynucleotide encoding an albumin fusion protein whose sequence is shown as SEQ ID NO:Y in Table 2. In other embodiments, the invention provides an albumin fusion protein comprising, or alternatively consisting of, a biologically active and/or therapeutically active fragment of a Therapeutic protein and a serum albumin protein. In other embodiments, the invention provides an albumin fusion protein comprising, or alternatively consisting of, a biologically active and/or therapeutically active variant of a Therapeutic protein and a serum albumin protein. In preferred embodiments, the serum albumin protein component of the albumin fusion protein is the mature portion of serum albumin. The invention further encompasses polynucleotides encoding these albumin fusion proteins.

[0046] In further embodiments, the invention provides an albumin fusion protein comprising, or alternatively consisting of, a Therapeutic protein, and a biologically active and/or therapeutically active fragment of serum albumin. In further embodiments, the invention provides an albumin fusion protein comprising, or alternatively consisting of, a Therapeutic protein and a biologically active and/or therapeutically active variant of serum albumin. In preferred embodiments, the Therapeutic protein portion of the albumin fusion protein is the mature portion of the Therapeutic protein. In a further preferred embodiment, the Therapeutic protein portion of the albumin fusion protein is the extracellular soluble domain of the Therapeutic protein. In an alternative embodiment, the Therapeutic protein portion of the albumin fusion protein is the active form of the Therapeutic protein. The invention further encompasses polynucleotides encoding these albumin fusion proteins.

[0047] In further embodiments, the invention provides an albumin fusion protein comprising, or alternatively consisting of, a biologically active and/or therapeutically active fragment or variant of a Therapeutic protein and a biologically active and/or therapeutically active fragment or variant of serum albumin. In preferred embodiments, the invention provides an albumin fusion protein comprising, or alternatively consisting of, the mature portion of a Therapeutic protein and the mature portion of serum albumin. The invention further encompasses polynucleotides encoding these albumin fusion proteins.

[0048] Therapeutic Proteins

[0049] As stated above, a polynucleotide of the invention encodes a protein comprising or alternatively consisting of, at least a fragment or variant of a Therapeutic protein and at least a fragment or variant of human serum albumin, which are associated with one another, preferably by genetic fusion.

[0050] An additional embodiment includes a polynucleotide encoding a protein comprising or alternatively consisting of at least a fragment or variant of a Therapeutic protein and at least a fragment or variant of human serum albumin, which are linked with one another by chemical conjugation.

[0051] As used herein, “Therapeutic protein” refers to proteins, polypeptides, antibodies, peptides or fragments or variants thereof, having one or more therapeutic and/or biological activities. Therapeutic proteins encompassed by the invention include but are not limited to, proteins, polypeptides, peptides, antibodies, and biologics. (The terms peptides, proteins, and polypeptides are used interchangeably herein.) It is specifically contemplated that the term “Therapeutic protein” encompasses antibodies and fragments and variants thereof. Thus a protein of the invention may contain at least a fragment or variant of a Therapeutic protein, and/or at least a fragment or variant of an antibody. Additionally, the term “Therapeutic protein” may refer to the endogenous or naturally occurring correlate of a Therapeutic protein.

[0052] By a polypeptide displaying a “therapeutic activity” or a protein that is “therapeutically active” is meant a polypeptide that possesses one or more known biological and/or therapeutic activities associated with a therapeutic protein such as one or more of the Therapeutic proteins described herein or otherwise known in the art. As a non-limiting example, a “Therapeutic protein” is a protein that is useful to treat, prevent or ameliorate a disease, condition or disorder. As a non-limiting example, a “Therapeutic protein” may be one that binds specifically to a particular cell type (normal (e.g., lymphocytes) or abnormal e.g., (cancer cells)) and therefore may be used to target a compound (drug, or cytotoxic agent) to that cell type specifically.

[0053] For example, a non-exhaustive list of “Therapeutic protein” portions which may be comprised by an albumin fusion protein of the invention includes, but is not limited to, IFNα, ANP, BNP, LANP, VDP, KUP, CNP, DNP, HCC-1, beta defensin-2, fractalkine, oxyntomodulin, killer toxin peptide, TIMP-4, PYY, adrenomedullin, ghrelin, CGRP, IGF-1, neuraminidase, hemagglutinin, butyrylcholinesterase, endothelin, and mechano growth factor.

[0054] Interferon hybrids may also be fused to the amino or carboxy terminus of albumin to form an interferon hybrid albumin fusion protein. Interferon hybrid albumin fusion protein may have enhanced, or alternatively, suppressed interferon activity, such as antiviral responses, regulation of cell growth, and modulation of immune response (Lebleu et al., PNAS USA, 73:3107-3111 (1976); Gresser et al., Nature, 251:543-545 (1974); and Johnson, Texas Reports Biol Med, 35:357-369 (1977)). Each interferon hybrid albumin fusion protein can be used to treat, prevent, or ameliorate viral infections (e.g., hepatitis (e.g., HCV); or HIV), multiple sclerosis, or cancer.

[0055] In one embodiment, the interferon hybrid portion of the interferon hybrid albumin fusion protein comprises an interferon alpha-interferon alpha hybrid (herein referred to as an alpha-alpha hybrid). For example, the alpha-alpha hybrid portion of the interferon hybrid albumin fusion protein consists, or alternatively comprises, of interferon alpha A fused to interferon alpha D. In a further embodiment, the A/D hybrid is fused at the common BgIII restriction site to interferon alpha D, wherein the N-terminal portion of the A/D hybrid corresponds to amino acids 1-62 of interferon alpha A and the C-terminal portion corresponds to amino acids 64-166 of interferon alpha D. For example, this A/D hybrid would comprise the amino acid sequence:

(SEQ ID NO: 99)

CDLPQTHSLGSRRTLMLLAQMRX₁ISLFSCLKDRHDFGFPQEEFGNQFQK
AETIPVLHEMIQQIFNLFTTKDSSAAWDEDLLDKFCTELYQQLNDLEACV
MQEERVGETPLMNX₂DSILAVKKYFRRITLYLTEKKYSPCAWEVVRAEIM
RSLSLSTNLQERLRRKE,

[0056] wherein the X₁ is R or K and the X₂ is A or V. In an additional embodiment, the A/D hybrid is fused at the common PvuIII restriction site, wherein the N-terminal portion of the A/D hybrid corresponds to amino acids 1-91 of interferon alpha A and the C-terminal portion corresponds to amino acids 93-166 of interferon alpha D. For example, this A/D hybrid would comprise the amino acid sequence:

(SEQ ID NO: 100)

CDLPQTHSLGSRRTLMLLAQMRX₁ISLFSCLKDRHDFGFPQEEFGNQFQK
AETIPVLHEMIQQIFNLFSTKDSSAAWDETLLDKFYTELYQQLNDLEACV
MQEERVGETPLMNX₂DSILAVKKYFRRITLYLTEKKYSPCAWEVVRAEIM
RSLSLSTNLQERLRRKE,

wherein the X₁ is R or K and the second X₂ is A or V. These hybrids are further described in U.S. Pat. No. 4,414,510, which is hereby incorporated by reference in its entirety.

[0057] In an additional embodiment, the alpha-alpha hybrid portion of the interferon hybrid albumin fusion protein consists, or alternatively comprises, of interferon alpha A fused to interferon alpha F. In a further embodiment, the A/F hybrid is fused at the common PvuIII restriction site, wherein the N-terminal portion of the A/F hybrid corresponds to amino acids 1-91 of interferon alpha A and the C-terminal portion corresponds to amino acids 93-166 of interferon alpha F. For example, this A/F hybrid would comprise the amino acid sequence:

(SEQ ID NO: 101)

CDLPQTHSLGSRRTLMLLAQMRXISLFSCLKDRHDFGFPQEEFGNQFQKA
ETIPVLHEMIQQIFNLFSTKDSSAAWDETLLDKFYTELYQQLNDMEACVI
QEVGVEETPLMNVDSILAVKKYFQRITLYLTEKKYSPCAWEVVRAEIMRS
FSLSKIFQERLRRKE,

[0058] wherein X is either R or K. These hybrids are further described in U.S. Pat. No. 4,414,510, which is hereby incorporated by reference in its entirety. In a further embodiment, the alpha-alpha hybrid portion of the interferon hybrid albumin fusion protein consists, or alternatively comprises, of interferon alpha A fused to interferon alpha B. In an additional embodiment, the A/B hybrid is fused at the common PvuIII restriction site, wherein the N-terminal portion of the A/B hybrid corresponds to amino acids 1-91 of interferon alpha A and the C-terminal portion corresponds to amino acids 93-166 of interferon alpha B. For example, this A/B hybrid would comprise an amino acid sequence:

(SEQ ID NO: 102)

CDLPQTHSLGSRRTLMLLAQMRX₁ISLFSCLKDRHDFGFPQEEFGNQFQK
AETIPVLHEMIQQIFNLFSTKDSSAAWDETLLDKFYTELYQQLNDLEX₂
X₃X₄X₅QEVGVLESPLMYEDSILAVRKYFQRITLYLTEKKYSSCAWEVVR
AEIMRSFSLSINLQKRLKSKE,

wherein the X₁ is R or K and X₂ through X₅ is SCVM or VLCD. These hybrids are further described in U.S. Pat. No. 4,414,510, which is hereby incorporated by reference in its entirety.

[0059] In another embodiment, the interferon hybrid portion of the interferon hybrid albumin fusion protein comprises an interferon beta-interferon alpha hybrid (herein referred to as a beta-alpha hybrid). For example, the beta-alpha hybrid portion of the interferon hybrid albumin fusion protein consists, or alternatively comprises, of interferon beta-1 fused to interferon alpha D (also referred to as interferon alpha-1). In a further embodiment, the beta-1/alpha D hybrid is fused wherein the N-terminal portion corresponds to amino acids 1-73 of interferon beta-1 and the C-terminal portion corresponds to amino acids 74-167 of interferon alpha D. For example, this beta-1/alpha D hybrid would comprise an amino acid sequence:

(SEQ ID NO: 103)

MSYNLLGFLQRSSNFQCQKLLWQLNGRLEYCLKDRMNFDIPEEIKQLQQF
QKEDAALTIYEMLQNIFAIFRQDSSAAWDEDLLDKFCTELYQQLNDLEAC
VMQEERVGETPLMNXDSILAVKKYFRRITLYLTEKKYSPCAWEVVRAEIM
RSLSLSTNLQERLRRKE,

wherein X is A or V. These hybrids are further described in U.S. Pat. No. 4,758,428, which is hereby incorporated by reference in its entirety.

[0060] In another embodiment, the interferon hybrid portion of the interferon hybrid albumin fusion protein comprises an interferon alpha-interferon beta hybrid (herein referred to as a alpha-beta hybrid). For example, the alpha-beta hybrid portion of the interferon hybrid albumin fusion protein consists, or alternatively comprises, of interferon alpha D (also referred to as interferon alpha-1) fused to interferon beta-1. In a further embodiment, the alpha D/beta-1 hybrid is fused wherein the N-terminal portion corresponds to amino acids 1-73 of interferon alpha D and the C-terminal portion corresponds to amino acids 74-166 of interferon beta-1. For example, this alpha D/beta-I hybrid would have an amino acid sequence:

(SEQ ID NO: 104)

MCDLPETHSLDNRRTLMLLAQMSRISPSSCLMDRHDFGFPQEEFDGNQFQ
KAPAISVLHELIQQIFNLFTTKDSSSTGWNETIVENLLANVYHQINHLKT
VLEEKLEKEDFTRGKLMSSLHLKRYYGRILHYLKAKEYSHCAWTIVRVEI
LRNFYFINRLTGYLRN.

These hybrids are further described in U.S. Pat. No. 4,758,428, which is hereby incorporated by reference in its entirety.

[0061] In further embodiments, the interferon hybrid portion of the interferon hybrid albumin fusion proteins may comprise additional combinations of alpha-alpha interferon hybrids, alpha-beta interferon hybrids, and beta-alpha interferon hybrids. In additional embodiments, the interferon hybrid portion of the interferon hybrid albumin fusion protein may be modified to include mutations, substitutions, deletions, or additions to the amino acid sequence of the interferon hybrid. Such modifications to the interferon hybrid albumin fusion proteins may be made, for example, to improve levels of production, increase stability, increase or decrease activity, or confer new biological properties.

[0062] The above-described interferon hybrid albumin fusion proteins are encompassed by the invention, as are host cells and vectors containing polynucleotides encoding the polypeptides. In one embodiment, a interferon hybrid albumin fusion protein encoded by a polynucleotide as described above has extended shelf life. In an additional embodiment, a interferon hybrid albumin fusion protein encoded by a polynucleotide described above has a longer serum half-life and/or more stabilized activity in solution (or in a pharmaceutical composition) in vitro and/or in vivo than the corresponding unfused interferon hybrid molecule.

[0063] In another non-limiting example, a “Therapeutic protein” is a protein that has a biological activity, and in particular, a biological activity that is useful for treating, preventing or ameliorating a disease. A non-inclusive list of biological activities that may be possessed by a Therapeutic protein includes, inhibition of HIV-1 infection of cells, stimulation of intestinal epithelial cell proliferation, reducing intestinal epithelial cell permeability, stimulating insulin secretion, induction of bronchodilation and vasodilation, inhibition of aldosterone and renin secretion, blood pressure regulation, promoting neuronal growth, enhancing an immune response, enhancing inflammation, suppression of appetite, or any one or more of the biological activities described in the “Biological Activities” section below and/or as disclosed for a given Therapeutic protein in Table 1 (column 2).

[0064] In one embodiment, IFN-alpha-HSA fusions are used to inhibit viral agents classified under Category A—Filo (Ebola), Arena (Pichende), Category B—Toga (VEE) or Category C-Bunya (Punto toro), Flavi (Yellow fever, West Nile). For example, CPE inhibition, neutral red staining and virus yield assays were employed to evaluate the antiviral activities of INF-alpha fused downstream of HSA (CID 3165 protein). The pharmacokinetics and pharmacodynamic activity of CID 3165 protein in cynomolgus monkeys and human subjects were evaluated. The results indicate that antiviral activity was achieved against all the RNA viruses evaluated with a favorable safety index. The IC50 values ranged from <0.1 ng/ml (Punta Toro A) to 19 ng/ml (VEE) in the CPE assay. In cynomolgus monkeys, the half-life of CID 3165 protein was 90 hours and was detectable up to 14 days post-dose. In human subjects, CID 3165 protein was safe and well tolerated. Cₘₐₓ following single injection doses was dose-proportional. The mean Cₘₐₓ in the 500 ug cohort was 22 ng/ml, and the mean t_{1/2} was 150 hours. Dosing once every 2-4 weeks or more is supported by the pharmacokinetics. Antiviral response against Hepatitis C was observed in the majority of subjects in the single injection cohorts (120-500 ug).

[0065] In a further embodiment, IFN-alpha-HSA fusions are used to treat patients with chronic Hepatitis C infection (HCV). Interferon alpha, also known as interferon alfa or leukocyte interferon, is the standard of care for treatment of patients infected with HCV. The term “interferon alpha” refers to a family of highly homologous related polypeptides with anti-viral activity. The interferon alpha portion of the IFN-alpha-HSA fusion consists or alternatively comprises any interferon alpha or fragment thereof known in the art. Non-limiting examples of the interferon alpha portion of the IFN-alpha-HSA fusion proteins of the invention include, but are not limited to, the interferon alpha proteins disclosed in the Therapeutic protein column of Table 1. In particular embodiments, the interferon alpha portion consists or alternatively comprises interferon alpha-2a, interferon alpha-2b, interferon alpha-2c, consensus interferon, interferon alfacon-1, interferon alpha-n1, interferon alpha-n3, any commercially available form of interferon alpha, such as, for example, INTRON® A (Schering Corp., Kenilworth, N.J.), ROFERON® A (Hoffman-La Roche, Nutley, N.J.), Berofor alpha interferon (Boehringer Ingelheim Pharmaceutical, Inc., Ridgefied, Conn.), OMNIFERON™ (Viragen, Inc., Plantation, Fla.), MULTIFERON™ (Viragen, Inc., Plantation, Fla.) WELLFERON® (GlaxoSmithKline, London, Great Britian), INFERGEN® (Amgen, Inc., Thousands Oaks, Calif.), SUMIFERON® (Sumitomo, Japan), BELEROFON® (Nautilus Biotech, France), MAXY-ALPHA™ (Maxygen, Redwood City, Calif./Hoffman-La Roche, Nutley, N.J.), or any purified interferon alpha product or a fragment thereof. In further embodiments, the interferon alpha portion of the IFN-alpha-HSA fusion protein consists or alternatively comprises interferon alpha modified or formulated for extended or controlled release. For example, the interferon alpha portion consists, or alternatively comprises commercially available extended release or controlled release interferon alpha, including, but not limited to interferon-alpha-XL (Flamel Technologies, France) and LOCTERON™ (BioLex Therapeutics/OctoPlus, Pittsboro, N.C.). In additional embodiments, the interferon alpha portion of the IFN-alpha-HSA fusion protein may be modified by the attachment of chemical moieties. For example, the interferon alpha portion may be modified by pegylation. Accordingly, in additional embodiments, the interferon alpha portion of the IFN-alpha-HSA fusion protein consists or alternatively comprises pegylated forms of interferon alpha-2a, 2b, or consensus interferon and include, but are not limited to, a commercially available pegylated interferon alpha, such as, for example, PEG-INTRON® (Schering Corp., Kenilworth, N.J.), PEGASYS® (Hoffman-La Roche, Nutley, N.J.), PEG-OMNIFERON™ (Viragen, Inc., Plantation, Fla.) or a fragment thereof. However, as used herein, “IFN-alpha-HSA” fusions refers to the HSA fused to any of the interferon alpha proteins known in the art or a fragment thereof.

[0066] Patients infected with HCV may fall within two categories based on previous exposure to an interferon regimen for treatment of the HCV infection. “Treatment-naïve patients” or “naïve patients” are those patients who have never been treated with an interferon regimen. “Treatment-experienced patients” or “experienced patients” are those patients who have been treated or are currently being treated with an interferon regimen. “Non-responders” are experienced patients who have been previously treated with an interferon regimen but have failed to meet the primary endpoint of treatment such as an early viral load reduction (EVR) or an end-of-treatment response (ETR). “Relapsers” are experienced patients who have previously been treated with an interferon regimen and have a achieved primary endpoint of treatment such as EVR or ETR, but become subsequently positive for HCV at later time points. However, as used herein, an “HCV patient” refers to a patient who is infected with HCV and who is either naïve or experienced. In addition, as used herein, an “HCV patient” who is “experienced” is either a non-responder or a relapser.

[0067] In addition, the Hepatitis C virus can be classified into numerous genotypes, with four genotypes, genotype 1, 2, 3, or 4, being the most prevalent. Generally, the Hepatitis C virus that infects an HCV patient comprises a single genotype. However, the Hepatitis virus can comprise a combination of two or more genotypes. In addition, the genotype of Hepatitis C virus may also be a variant of one of the known HCV genotypes. In a further embodiment, the Hepatitis C virus of the HCV patient is genotype 1 or a variant thereof. However, as used herein, “HCV” refers to the Hepatitis C virus of any genotype, or combination or variants thereof.

[0068] The standard treatment regimen for patients with HCV involves treatment with interferon alpha in combination with an antiviral agent, such as, ribavirin. In general, the interferon alpha is administered daily, twice-a-week, or weekly and the ribavirin is administered daily. However, recent studies have also used interferon alpha in combination with other antiviral agents known in the art for the treatment of HCV. Thus, in a further embodiment the IFN-alpha-HSA fusion may be administered to the HCV patient either alone or in combination with an antiviral agent, such as, for example, ribavirin. In a more preferred embodiment, IFN-alpha-HSA fusion may be administered to the HCV patient in combination with one, two three, or more antiviral agents, such as, for example, ribavirin and an additional antiviral agent.

[0069] As noted above, pharmokinetics of the CID 3165 protein support a dosing schedule of once every 2-4 weeks or greater. Thus, in a further embodiment, the HCV patients are treated with an IFN-alpha-HSA fusion by administration once every 2-4 weeks alone or in combination with an effective amount of an antiviral agent. In a preferred embodiment, the HCV patients are treated with an IFN-alpha-HSA fusion by administration once every 2-4 weeks in combination with an effective amount of one, two three, or more antiviral agents. In an additional preferred embodiment, the IFN-alpha-HSA fusion is administered to the HCV patient once every 4 weeks. In an additional preferred embodiment, the IFN-alpha-HSA fusion is administered to the HCV patient more than once every 4 weeks. In additional embodiments, the IFN-alpha-HSA fusion is adminstered once every 4 weeks or more to an HCV patient, wherein the treatment also includes administration of an effective amount of one, two three, or more antiviral agents.

[0070] In a another embodiment, IFN-alpha-HSA fusions may be used as a low-dose monotherapy for maintenance therapy of HCV. In a further additional embodiment, IFN-alpha-HSA fusions may used in combination with ribavirin and one or more other antiviral agents for the treatment of HCV. Alternatively, in another embodiment, IFN-alpha-HSA fusions may be used in combination with one, two, three, or more antiviral agents, other than ribavirin, for the treatment of HCV.

[0071] In an additional embodiment, IFN-alpha-HSA fusions may be used for the treatment of other viral infections. For example, in one embodiment, IFN-alpha-HSA fusions may be used for the treatment of Hepatitis B (HBV). In an additional embodiment, IFN-alpha-HSA fusions may be used for the treatment of Human Papilloma Virus (HPV). In a further embodiment, IFN-alpha-HSA fusions may be used in the treatment of cancer, including, but not limited to hairy cell leukemia, malignant melanoma, follicular lymphoma, chronic myelogenous leukemia, AIDS related Kaposi's Sarcoma, multiple myeloma, or renal cell cancer.

[0072] In another embodiment, HSA fusions with natriuretic peptides, including but not limited to ANP-HSA fusions or BNP-HSA fusions, may be used for the treatment of cardiovascular disorders. For example, in a preferred embodiment, HSA fusions with natriuretic peptides, including but not limited to ANP-HSA fusions or BNP-HSA fusions, may be used for the treatment of congestive heart failure. In an additional preferred embodiment, HSA fusions with natriuretic peptides, including but not limited to ANP-HSA fusions or BNP-HSA fusions, may be used in the treatment of post-myocardial infarction. In additional embodiments, HSA fusions with natriuretic peptides, including but not limited to ANP-HSA fusions or BNP-HSA fusions, may be used to additional cardiovascular disorders, including, but not limited to hypertension, salt-sensitive hypertension, angina pectoris, peripheral artery disease, hypotension, cardiac volume overload, cardiac decompensation, cardiac failure, left ventricular dysfunction, dyspnea, myocardial reperfusion injury, or left ventricular remodeling. In another embodiment, HSA fusions with natriuretic peptides, including but not limited to ANP-HSA fusions or BNP-HSA fusions, may be used in the treatment for elevated aldosterone levels, which can lead to vasoconstriction, impaired cardiac output and/or hypertension. In further embodiments, HSA fusions with natriuretic peptides, including but not limited to ANP-HSA fusions or BNP-HSA fusions, may be used in the treatment of renal diseases, including, but not limited to diabetic nephropathy; glomerular hypertrophy, glomerular injury, renal glomerular disease, acute and/or chronic renal failure. In an additional embodiment, HSA fusions with natriuretic peptides, including but not limited to ANP-HSA fusions or BNP-HSA fusions, may be used to treat stroke or excess fluid in tissues.

[0073] In an additional embodiment, HSA may be fused with natriuretic peptide variants including, but not limited to, BNP-HSA fusions wherein the BNP component of the fusion protein is BNP amino acid residues 1-29. In one embodiment, the BNP component of the HSA fusion protein consists of two BNP variants (e.g., BNP amino acid residues 1-29) in tandem. In another embodiment, the BNP component of the HSA fusion protein consists of three, four, five or more BNP variants (e.g., BNP amino acid residues 1-29) in tandem. In a preferred embodiment, HSA fusions with BNP variants (e.g., BNP amino acid residues 1-29) may be used for the treatment of congestive heart failure. In an additional preferred embodiment, HSA fusions with BNP variants (e.g., BNP amino acid residues 1-29) may be used in the treatment of post-myocardial infarction. In an additional embodiment, HSA fusions with BNP variants (e.g., BNP amino acid residues 1-29) may be used to treat additional cardiovascular disorders, including, but not limited to, hypertension, salt-sensitive hypertension, angina pectoris, peripheral artery disease, hypotension, cardiac volume overload, cardiac decompensation, cardiac failure, non-hemodynamic CHF, left ventricular dysfunction, dyspnea, myocardial reperfusion injury, or left ventricular remodeling. In another embodiment, HSA fusions with BNP variants (e.g., BNP amino acid residues 1-29) may be used in the treatment for elevated aldosterone levels, which can lead to vasoconstriction, impaired cardiac output and/or hypertension. In a preferred embodiment, HSA fusion with BNP variants (e.g., BNP amino acid residues 1-29) may be used in the treatment of renal disorders or diseases, including, but not limited to, diabetic nephropathy; glomerular hypertrophy, glomerular injury, renal glomerular disease, acute and/or chronic renal failure. In an additional embodiment HSA fusions with BNP variants (e.g., BNP amino acid residues 1-29) may be used to treat stroke or excess fluid in tissues.

[0074] In related but distinct embodiments, the invention is directed to natriuretic peptide variants including, but not limited to BNP amino acid residues 1-29, wherein the peptides are not fused with HSA. In one embodiment, the BNP variants of the invention have the sequence of two BNP variants (e.g., BNP amino acid residues 1-29) in tandem. In an additional embodiment, the BNP variants of the invention have the sequence of three, four, five or more BNP variants (e.g., BNP amino acid residues 1-29) in tandem. In a preferred embodiment, the BNP variants (e.g., BNP amino acid residues 1-29) of the invention may be used for the treatment of congestive heart failure. In an additional preferred embodiment, the BNP variants (e.g., BNP amino acid residues 1-29) of the invention may be used in the treatment of post-myocardial infarction. In an additional embodiment, the BNP variants (e.g., BNP amino acid residues 1-29) of the invention may be used to treat additional cardiovascular disorders, including, but not limited to, hypertension, salt-sensitive hypertension, angina pectoris, peripheral artery disease, hypotension, cardiac volume overload, cardiac decompensation, cardiac failure, non-hemodynamic CHF, left ventricular dysfunction, dyspnea, myocardial reperfusion injury, or left ventricular remodeling. In another embodiment, the BNP variants (e.g., BNP amino acid residues 1-29) of the invention may be used in the treatment for elevated aldosterone levels, which can lead to vasoconstriction, impaired cardiac output and/or hypertension. In a further preferred embodiment, the BNP variants (e.g., BNP amino acid residues 1-29) of the invention may be used in the treatment of renal disorders or diseases, including, but not limited to, diabetic nephropathy; glomerular hypertrophy, glomerular injury, renal glomerular disease, acute and/or chronic renal failure. In an additional embodiment, the BNP variants (e.g., BNP amino acid residues 1-29) of the invention may be used to treat stroke or excess fluid in tissues.

[0075] In a further embodiment, the invention is directed to natriuretic peptide variants including, but not limited to, BNP variants (e.g., BNP amino acid residues 1-29), that have been modified in order to extend half-life, biological activity, and/or to facilitate purification of the variant. According to this embodiment, the natriuretic peptide variants (e.g., BNP amino acid residues 1-29) may be pegylated, methylated, or otherwise chemically modified or conjugated using techniques known in the art. Alternatively, methods known in the art may be used to recombinantly fuse the natriuretic peptide variants of the invention to other peptide sequences known in the art to extend half-life, improve biological activity and/or facilitate purification. For example, natriuretic peptide variants of the invention may be fused or conjugated to an antibody Fc region, or portion thereof. The antibody portion fused to a natriuretic variants (e.g., BNP amino acid residues 1-29) of the invention may comprise the constant region, hinge region, CH1 domain, CH2 domain, and CH3 domain or any combination of whole domains or portions thereof. The natriuretic variants may also be fused or conjugated to the above antibody portions to form multimers. For example, Fc portions fused to the polypeptides of the present invention (e.g., BNP amino acid residues 1-29) can form dimers through disulfide bonding between the Fc portions. Higher multimeric forms can be made by fusing the variants to portions of IgA and IgM. Methods for fusing or conjugating the variants of the present invention to antibody portions are known in the art. See, e.g., U.S. Pat. Nos. 5,336,603; 5,622,929; 5,359,046; 5,349,053; 5,447,851; 5,112,946; EP 307,434; EP 367,166; PCT publications WO 96/04388; WO 91/06570; Ashkenazi et al., Proc. Natl. Acad. Sci. USA 88:10535-10539 (1991); Zheng et al., J. Immunol. 154:5590-5600 (1995); and Vil et al., Proc. Natl. Acad. Sci. USA 89:11337-11341 (1992) (said references incorporated by reference in their entireties). In an additional embodiment, the modified BNP variants of the invention have the sequence of two BNP variants (e.g., BNP amino acid residues 1-29) in tandem. In an additional embodiment, the modified BNP variants of the invention have the sequence of three, four, five or more BNP variants (e.g., BNP amino acid residues 1-29) in tandem. In a preferred embodiment, the modified BNP variants (e.g., BNP amino acid residues 1-29) of the invention may be used for the treatment of congestive heart failure. In a preferred embodiment, the modified BNP variants (e.g., BNP amino acid residues 1-29) of the invention may be used in the treatment of post-myocardial infarction. In an additional embodiment, the modified BNP variants (e.g., BNP amino acid residues 1-29) of the invention may be used to treat additional cardiovascular disorders, including, but not limited to, hypertension, salt-sensitive hypertension, angina pectoris, peripheral artery disease, hypotension, cardiac volume overload, cardiac decompensation, cardiac failure, non-hemodynamic CHF, left ventricular dysfunction, dyspnea, myocardial reperfusion injury, or left ventricular remodeling. In another embodiment, the modified BNP variants (e.g., BNP amino acid residues 1-29) of the invention may be used in the treatment for elevated aldosterone levels, which can lead to vasoconstriction, impaired cardiac output and/or hypertension. In a preferred embodiment, the modified BNP variants (e.g., BNP amino acid residues 1-29) of the invention may be used in the treatment of renal disorders or diseases, including, but not limited to, diabetic nephropathy; glomerular hypertrophy, glomerular injury, renal glomerular disease, acute and/or chronic renal failure. In an additional embodiment, the modified BNP variants (e.g., BNP amino acid residues 1-29) of the invention may be used to treat stroke or excess fluid in tissues.

[0076] In another embodiment, CNP-HSA fusions may be used in the regulation of endochondral ossification. For example, in a preferred embodiment, CNP-HSA fusions may be used in the treatment of skeletal dysplasias, including, but not limited to anchondroplasia, hypochondroplasia, and thanatophoric dysplasia.

[0077] As used herein, “therapeutic activity” or “activity” may refer to an activity whose effect is consistent with a desirable therapeutic outcome in humans, or to desired effects in non-human mammals or in other species or organisms. Therapeutic activity may be measured in vivo or in vitro. For example, a desirable effect may be assayed in cell culture. Such in vitro or cell culture assays are commonly available for many Therapeutic proteins as described in the art. Examples of assays include, but are not limited to those described herein in the Examples section or in the “Exemplary Activity Assay” column (column 3) of Table 1. Therapeutic proteins corresponding to a Therapeutic protein portion of an albumin fusion protein of the invention, such as cell surface and secretory proteins, are often modified by the attachment of one or more oligosaccharide groups. The modification, referred to as glycosylation, can dramatically affect the physical properties of proteins and can be important in protein stability, secretion, and localization. Glycosylation occurs at specific locations along the polypeptide backbone. There are usually two major types of glycosylation: glycosylation characterized by O-linked oligosaccharides, which are attached to serine or threonine residues; and glycosylation characterized by N-linked oligosaccharides, which are attached to asparagine residues in an Asn-X-Ser or Asn-X-Thr sequence, where X can be any amino acid except proline. N-acetylneuramic acid (also known as sialic acid) is usually the terminal residue of both N-linked and 0-linked oligosaccharides. Variables such as protein structure and cell type influence the number and nature of the carbohydrate units within the chains at different glycosylation sites. Glycosylation isomers are also common at the same site within a given cell type. Therapeutic proteins corresponding to a Therapeutic protein portion of an albumin fusion protein of the invention, as well as analogs and variants thereof, may be modified so that glycosylation at one or more sites is altered as a result of manipulation(s) of their nucleic acid sequence, by the host cell in which they are expressed, or due to other conditions of their expression. For example, glycosylation isomers may be produced by abolishing or introducing glycosylation sites, e.g., by substitution or deletion of amino acid residues, such as substitution of glutamine for asparagine, or unglycosylated recombinant proteins may be produced by expressing the proteins in host cells that will not glycosylate them, e.g. in E. coli or glycosylation-deficient yeast. These approaches are described in more detail below and are known in the art. Therapeutic proteins, particularly those disclosed in Table 1, and their nucleic acid and amino acid sequences are well known in the art and available in public databases such as Chemical Abstracts Services Databases (e.g., the CAS Registry), GenBank, and subscription provided databases such as GenSeq (e.g., Derwent). Exemplary nucleotide sequences of Therapeutic proteins which may be used to derive a polynucleotide of the invention are shown in column 7, “SEQ ID NO:X,” of Table 2. Sequences shown as SEQ ID NO:X may be a wild type polynucleotide sequence encoding a given Therapeutic protein (e.g., either full length or mature), or in some instances the sequence may be a variant of said wild type polynucleotide sequence (e.g., a polynucleotide which encodes the wild type Therapeutic protein, wherein the DNA sequence of said polynucleotide has been optimized, for example, for expression in a particular species; or a polynucleotide encoding a variant of the wild type Therapeutic protein (i.e., a site directed mutant; an allelic variant)). It is well within the ability of the skilled artisan to use the sequence shown as SEQ ID NO:X to derive the construct described in the same row. For example, if SEQ ID NO:X corresponds to a full length protein, but only a portion of that protein is used to generate the specific CID, it is within the skill of the art to rely on molecular biology techniques, such as PCR, to amplify the specific fragment and clone it into the appropriate vector.

[0078] Additional Therapeutic proteins corresponding to a Therapeutic protein portion of an albumin fusion protein of the invention include, but are not limited to, one or more of the Therapeutic proteins or peptides disclosed in the “Therapeutic Protein X” column of Table 1 (column 1), or fragment or variant thereof.

[0079] Table 1 provides a non-exhaustive list of Therapeutic proteins that correspond to a Therapeutic protein portion of an albumin fusion protein of the invention, or an albumin fusion protein encoded by a polynucleotide of the invention. The first column, “Therapeutic Protein X,” discloses Therapeutic protein molecules that may be followed by parentheses containing scientific and brand names of proteins that comprise, or alternatively consist of, that Therapeutic protein molecule or a fragment or variant thereof. “Therapeutic protein X” as used herein may refer either to an individual Therapeutic protein molecule, or to the entire group of Therapeutic proteins associated with a given Therapeutic protein molecule disclosed in this column. The “Biological activity” column (column 2) describes Biological activities associated with the Therapeutic protein molecule. Column 3, “Exemplary Activity Assay,” provides references that describe assays which may be used to test the therapeutic and/or biological activity of a Therapeutic protein:X or an albumin fusion protein comprising a Therapeutic protein X (or fragment thereof) portion. Each of the references cited in the “Exemplary Activity Assay” column are herein incorporated by reference in their entireties, particularly with respect to the description of the respective activity assay described in the reference (see Methods section therein, for example) for assaying the corresponding biological activity set forth in the “Biological Activity” column of Table 1. The fourth column, “Preferred Indication: Y,” describes disease, disorders, and/or conditions that may be treated, prevented, diagnosed, and/or ameliorated by Therapeutic protein X or an albumin fusion protein comprising a Therapeutic protein X (or fragment thereof) portion. The “Construct ID” column (column 5) provides a link to an exemplary albumin fusion construct disclosed in Table 2 which encodes an albumin fusion protein comprising, or alternatively consisting of the referenced Therapeutic Protein X (or fragment thereof) portion.

TABLE 1

| Therapeutic Protein: X | Biological Activity | Exemplary Activity Assay | Preferred Indication: Y |
|---|---|---|---|
| Interferon alpha | Confers a range of | Anti-viral assay: Rubinstein S, | Viral infections include Severe |
| (Interferon alfa-2b; | cellular responses | Familletti PC, Pestka S. | Acute Respiratory Syndrome |
| Interferon alfa-2a; | including antiviral, | (1981) Convenient assay for | (SARS) and other coronavirus |
| recombinant; Interferon | antiproliferative, | interferons. J. Virol. | infections; filoviruses, including but |
| alfa-n1; Interferon alfa- | antitumor and | 37(2): 755-8; Anti- | not limited to Ebola viruses and |
| n3; Peginterferon alpha- | immunomodulatory | proliferation assay: Gao Y, et | Marburg virus; Arenaviruses, |
| 2b; Ribavirin and | activities; stimulate | al (1999) Sensitivity of an | including but not limited to |
| interferon alfa-2b; | production of two | epstein-barr virus-positive | Pichende virus, Lassa virus, Junin |
| Interferon alfacon-1; | enzymes: a protein | tumor line, Daudi, to alpha | virus, Machupo virus, Guanarito |
| interferon consensus; YM | kinase and an | interferon correlates with | virus; and lymphocytic |
| 643; CIFN; interferon- | oligoadenylate | expression of a GC-rich viral | choriomeningitis virus (LCMV); |
| alpha consensus; | synthetase. | transcript. Mol Cell Biol. | Bunyaviruses, including but not |
| recombinant methionyl | | 19(11): 7305-13. | limited to Punta toro virus, |
| consensus interferon; | | | Crimean-Congo hemorrhagic fever |
| recombinant consensus | | | virus, sandfly fever viruses, Rift |
| interferon; CGP 35269; | | | Valley fever virus, La Crosse virus, |
| RO 253036; RO 258310; | | | and hantaviruses; Flaviviruses, |
| INTRON A; PEG- | | | including but not limited to Yellow |
| INTRON; OIF; | | | Fever, Banzi virus, West Nile virus, |
| OMNIFERON; PEG- | | | Dengue viruses, Japanese |
| OMNIFERON; | | | Encephalitis virus, Tick-borne |
| VELDONA; PEG- | | | encephalitis, Omsk Hemorrhagic |
| REBETRON; ROFERON | | | Fever, and Kyasanur Forest Disease |
| A; WELLFERON; | | | virus; Togaviruses, including but not |
| ALFERON N/LDO; | | | limited to Venezuelan, eastern, and |
| REBETRON; | | | western equine encephalitis viruses, |
| ALTEMOL; | | | Ross River virus, and Rubella virus; |
| VIRAFERONPEG; | | | Orthopox viruses, including but not |
| PEGASYS; | | | limited to Vaccinia, Cowpox, |
| VIRAFERON; | | | Smallpox, and Monkeypox; |
| VIRAFON; AMPLIGEN; | | | Herpesviruses; FluA/B; Respiratory |
| INFERGEN; INFAREX; | | | Sincytial virus (RSV); paraflu; |
| ORAGEN) | | | measles; rhinoviruses; adenoviruses; |
| | | | Semliki Forest virus; Viral |
| | | | Hemorrhagic fevers; Rhabdoviruses; |
| | | | Paramyxoviruses, including but not |
| | | | limited to Nipah virus and Hendra |
| | | | virus; and other viral agents |
| | | | identified by the U.S. Centers for |
| | | | Disease Control and Prevention as |
| | | | high-priority disease agents (i.e., |
| | | | Category A, B, and C agents; see, |
| | | | e.g., Moran, Emerg. Med. Clin. |
| | | | North. Am. 2002; 20(2): 311-30 and |
| | | | Darling et al., Emerg. Med. Clin. |
| | | | North Am. 2002; 20(2): 273-309). |
| Atrial natriuretic peptide | ANP is diuretic | Renin and aldosterone levels | Hypertension; salt-sensitive |
| (ANP; atrial natriuretic | (natriuretic), | can be measured using | hypertension; congestive heart |
| factor; ANF) | hypotensive, and has | methods known in the art, for | failure; angina pectoris, peripheral |
| | an inhibitory effect | example, in Yamato et al., | artery disease; diabetic nephropathy; |
| | on renin and | Circ J 2003 May; 67(5): 384-90. | stroke; kidney failure; acute and/or |
| | aldosterone secretion. | Blood pressure can be | chronic renal failure; acute tubular |
| | Involved in | measured with a | necrosis; acute renal failure; renal |
| | regulation of blood | sphygmomanometer or using | disease; renal glomerular disease; |
| | pressure and salt and | other methods known in the | excess fluid in tissues; hypotension; |
| | water balance/ | art, such as in Reddy et al., | cardiac volume overload; cardiac |
| | electrolyte | Ultrasound Med Biol 2003 | decompensation; left ventricular |
| | homeostasis in body | Mar; 29(3): 379-85. | dysfunction; dyspnea; treatment for |
| | fluids. | | elevated aldosterone levels, which |
| | | | can lead to vasoconstriction, |
| | | | impaired cardiac output and/or |
| | | | hypertension; cardiovascular |
| | | | disease; cardiac failure; myocardial |
| | | | reperfusion injury; left ventricular |
| | | | remodeling; post-myocardial |
| | | | infarction. |
| B-type natriuretic peptide | Stimulates smooth | Inhibition of angiotensin can | Hypertension; salt-sensitive |
| (BNP, brain natriuretic | muscle relaxation | be determined using assays | hypertension; congestive heart |
| peptide) | and vasodilation, | known in the art, for example | failure; angina pectoris, peripheral |
| | natriuresis, and | using an in vitro proliferation | artery disease; diabetic nephropathy; |
| | suppression of renin- | assay with rat cardiac | stroke; kidney failure; acute and/or |
| | angiotensin and | fibroblasts as described in | chronic renal failure; acute tubular |
| | endothelin. | Naunyn Schmiedebergs Arch | necrosis; acute renal failure; renal |
| | | Pharmacol 1999 | disease; renal glomerular disease; |
| | | May; 359(5): 394-9. | excess fluid in tissues; hypotension; |
| | | Vasodilation can be measured | cardiac volume overload; cardiac |
| | | in animals by measuring the | decompensation; left ventricular |
| | | myogenic responses of small | dysfunction; dyspnea; treatment for |
| | | renal arteries in an isobaric | elevated aldosterone levels, which |
| | | arteriograph system (see Am J | can lead to vasoconstriction, |
| | | Physiol Regul Integr Comp | impaired cardiac output and/or |
| | | Physiol 2002 | hypertension; cardiovascular |
| | | Aug; 283(2): R349-R355). | disease; cardiac failure; myocardial |
| | | Natriuesis is determined by | reperfusion injury; left ventricular |
| | | measuring the amount of | remodeling; post-myocardial |
| | | sodium in the urine. | infarction. |
| Long-acting natriuretic | Inhibits renal Na⁺- | Renal Na⁺-K⁺-ATPase | Hypertension; salt-sensitive |
| peptide (LANP; proANP- | K⁺-ATPase; | activity can be measured | hypertension; congestive heart |
| (31-67); | enhances synthesis of | using assays known in the art, | failure; angina pectoris, peripheral |
| | prostaglandin E2 that | such as in Ku et al., 1987; | artery disease; diabetic nephropathy; |
| | regulates contraction | Endocrinology 120: 2166-2173. | stroke; kidney failure; acute and/or |
| | and relaxation of | Vasodilation can be | chronic renal failure; acute tubular |
| | smooth muscle, as | measured using assays known | necrosis; acute renal failure; renal |
| | well as the dilation | in the art (Ashton et al. | disease; renal glomerular disease; |
| | and constriction of | Pharmacology 2000; | excess fluid in tissues; hypotension; |
| | blood vessels; | 61(2): 101-105. Prostaglandin | cardiac volume overload; cardiac |
| | inhibits plasma renin | E2 synthesis can be | decompensation; left ventricular |
| | activity; causes | determined using assays | dysfunction; dyspnea; treatment for |
| | diuresis and | known in the art, (Cheng et | elevated aldosterone levels, which |
| | natriuresis. Involved | al., J Endocrinol. 2004 | can lead to vasoconstriction, |
| | in regulation of blood | Aug; 182(2): 249-56). Blood | impaired cardiac output and/or |
| | pressure and | pressure can be measured | hypertension; cardiovascular |
| | salt/water/electrolyte | with a sphygmomanometer or | disease; cardiac failure; myocardial |
| | balance in body | using other methods known in | reperfusion injury; left ventricular |
| | fluids; | the art, such as in Reddy et | remodeling; post-myocardial |
| | renoprotection. | al., Ultrasound Med Biol | infarction. |
| | | 2003 Mar; 29(3): 379-85. | |
| | | Natriuesis is determined by | |
| | | measuring the amount of | |
| | | sodium in the urine. Diuresis | |
| | | is determined by measuring | |
| | | the amount of urine secreted. | |
| Vessel Dialator (VDP; | Inhibits renal Na⁺- | Renal Na⁺-K⁺-ATPase | Hypertension; salt-sensitive |
| proANP-(79-98)). | K⁺-ATPase; | activity can be measured | hypertension; congestive heart |
| | enhances synthesis of | using assays known in the art, | failure; angina pectoris, peripheral |
| | prostaglandin E2 that | such as in Ku et al., 1987; | artery disease; diabetic nephropathy; |
| | regulates contraction | Endocrinology 120: 2166-2173. | stroke; kidney failure; acute and/or |
| | and relaxation of | Vasodilation can be | chronic renal failure; acute tubular |
| | smooth muscle, as | measured using assays known | necrosis; acute renal failure; renal |
| | well as the dilation | in the art (Ashton et al. | disease; renal glomerular disease; |
| | and constriction of | Pharmacology 2000; | excess fluid in tissues; hypotension; |
| | blood vessels; | 61(2): 101-105. Prostaglandin | cardiac volume overload; cardiac |
| | inhibits aldosterone | E2 synthesis can be | decompensation; left ventricular |
| | secretion; causes | determined using assays | dysfunction; dyspnea; treatment for |
| | natriuresis in patients | known in the art, (Cheng et | elevated aldosterone levels, which |
| | with congestive heart | al., J Endocrinol. 2004 | can lead to vasoconstriction, |
| | failure; causes | Aug; 182(2): 249-56). | impaired cardiac output and/or |
| | kaliuresis. Involved | Aldosterone levels can be | hypertension; cardiovascular |
| | in regulation of blood | measured using methods | disease; cardiac failure; myocardial |
| | pressure and | known in the art, for example, | reperfusion injury; left ventricular |
| | salt/water/electrolyte | in Yamato et al., Circ J 2003; | remodeling; post-myocardial |
| | balance in body | May; 67(5): 384-90. Blood | infarction. |
| | fluids; | pressure can be measured | |
| | renoprotection. | with a sphygmomanometer or | |
| | | using other methods known in | |
| | | the art, such as in Reddy et | |
| | | al., Ultrasound Med Biol | |
| | | 2003 Mar; 29(3): 379-85. | |
| | | Natriuesis is determined by | |
| | | measuring the amount of | |
| | | sodium in the urine. | |
| | | Kaliuresis is determined by | |
| | | measuring the amount of | |
| | | potassium in the urine. | |
| Kaliuretic Peptide (KUP; | Involved in | Blood pressure can be | Hypertension; salt-sensitive |
| proANP-(99-126)). | regulation of blood | measured with a | hypertension; congestive heart |
| | pressure and | sphygmomanometer or using | failure; angina pectoris, peripheral |
| | salt/water/electrolyte | other methods known in the | artery disease; diabetic nephropathy; |
| | balance in body | art, such as in Reddy et al., | stroke; kidney failure; acute and/or |
| | fluids. | Ultrasound Med Biol 2003 | chronic renal failure; acute tubular |
| | | Mar; 29(3): 379-85. Natriuesis | necrosis; acute renal failure; renal |
| | | is determined by measuring | disease; renal glomerular disease; |
| | | the amount of sodium in the | excess fluid in tissues; hypotension; |
| | | urine. Diuresis is determined | cardiac volume overload; cardiac |
| | | by measuring the amount of | decompensation; left ventricular |
| | | urine secreted.. | dysfunction; dyspnea; treatment for |
| | | | elevated aldosterone levels, which |
| | | | can lead to vasoconstriction, |
| | | | impaired cardiac output and/or |
| | | | hypertension; cardiovascular |
| | | | disease; cardiac failure; myocardial |
| | | | reperfusion injury; left ventricular |
| | | | remodeling; post-myocardial |
| | | | infarction. |
| C-type Natriuretic Peptide | Promotes diuresis | Natriuesis is determined by | Hypertension; salt-sensitive |
| (CNP) | and natriuresis. | measuring the amount of | hypertension; congestive heart |
| | Involved in | sodium in the urine. Diuresis | failure; angina pectoris, peripheral |
| | regulation of blood | is determined by measuring | artery disease; diabetic nephropathy; |
| | pressure and | the amount of urine secreted. | stroke; kidney failure; acute and/or |
| | salt/water/electrolyte | cGMP production in bone can | chronic renal failure; acute tubular |
| | balance in body | be measured using assays in | necrosis; acute renal failure; renal |
| | fluids. Involved in | the art (Yasoda et al., J. Biol. | disease; renal glomerular disease; |
| | the regulation of | Chem. 1998; 273: 11695-11700. | excess fluid in tissues; hypotension; |
| | endochondral | | cardiac volume overload; cardiac |
| | ossification of bone. | | decompensation; left ventricular |
| | | | dysfunction; dyspnea; treatment for |
| | | | elevated aldosterone levels, which |
| | | | can lead to vasoconstriction, |
| | | | impaired cardiac output and/or |
| | | | hypertension; cardiovascular |
| | | | disease; cardiac failure; myocardial |
| | | | reperfusion injury; left ventricular |
| | | | remodeling; post-myocardial |
| | | | infarction; skeletal dysplasias |
| | | | including anchondroplasia, |
| | | | hypochondroplasia and |
| | | | thanatophoric dysplasia. |
| Dendroaspis natriuretic | Inhibits Na⁺-K⁺- | Renal Na⁺-K⁺-ATPase | Hypertension; salt-sensitive |
| peptide (DNP) | ATPase; enhances | activity can be measured | hypertension; congestive heart |
| | synthesis of | using assays known in the art, | failure; angina pectoris, peripheral |
| | prostaglandin E2 that | such as in Ku et al., 1987; | artery disease; diabetic nephropathy; |
| | regulates contraction | Endocrinology 120: 2166-2173. | stroke; kidney failure; acute and/or |
| | and relaxation of | Vasodilation can be | chronic renal failure; acute tubular |
| | smooth muscle, as | measured using assays known | necrosis; acute renal failure; renal |
| | well as the dilation | in the art (Ashton et al. | disease; renal glomerular disease; |
| | and constriction of | Pharmacology 2000; | excess fluid in tissues; hypotension; |
| | blood vessels; | 61(2): 101-105. Prostaglandin | cardiac volume overload; cardiac |
| | inhibits aldosterone | E2 synthesis can be | decompensation; left ventricular |
| | secretion; causes | determined using assays | dysfunction; dyspnea; treatment for |
| | diuresis and | known in the art, (Cheng et | elevated aldosterone levels, which |
| | natriuresis. Involved | al., J Endocrinol. 2004 | can lead to vasoconstriction, |
| | in regulation of blood | Aug; 182(2): 249-56). | impaired cardiac output and/or |
| | pressure and | Aldosterone levels can be | hypertension; cardiovascular |
| | salt/water/electrolyte | measured using methods | disease; cardiac failure; myocardial |
| | balance in body | known in the art, for example, | reperfusion injury; left ventricular |
| | fluids; | in Yamato et al., Circ J 2003 | remodeling; post-myocardial |
| | renoprotection. | May; 67(5): 384-90. Blood | infarction. |
| | | pressure can be measured | |
| | | with a sphygmomanometer or | |
| | | using other methods known in | |
| | | the art, such as in Reddy et | |
| | | al., Ultrasound Med Biol | |
| | | 2003 Mar; 29(3): 379-85. | |
| | | Natriuesis is determined by | |
| | | measuring the amount of | |
| | | sodium in the urine. Diuresis | |
| | | is determined by measuring | |
| | | the amount of urine secreted. | |
| Beta defensin-2 (beta | Involved in the innate | Antimicrobial activity can be | Treatment of fungal, bacterial, or |
| defensin 4; SAP1; | defense system as an | measured using assays known | viral infection; Infection in immune- |
| DEFB2; HBD-2; DEFB- | antimicrobial | in the art, such as in Bals et | compromised disease states; |
| 2; DEFB 102; skin- | peptide; kills gram | al., J. Clin. Invest. 1998 Sept | Inflammation; Gingivitis; |
| antimicrobial peptide 1) | negative and gram | 102(5): 874-880. | Bronchiolitis obliterans syndrome; |
| | positive organisms, | | Oral squamous cell carcinoma; |
| | such as, for example, | | Uterine infection; Psoriasis; |
| | E. coli, P. aeruginosa, | | Neonatal infection; Lung cancer; |
| | S. aureus, E. faecalis, | | Inflammatory bowel Disease; |
| | and Candida sp.; | | Gastritis; Middle ear infection |
| | stimulates | | |
| | odontoblast | | |
| | differentiation | | |
| Human chemokine HCC- | Involved in | Chemokine activities can be | Autoimmune disorders; Immunity; |
| 1 (ckBeta-1; CKB-1; | inflammation, | determined using assays | Vascular and Inflammatory |
| HWFBD) | allergy, tissue | known in the art: Methods in | disorders; HIV; AIDS; infectious |
| | rejection, viral | Molecular Biology, 2000, vol. | diseases. |
| | infection, and tumor | 138: Chemokine Protocols. | |
| | biology; enhances | Edited by: A. E. I. Proudfoot, | |
| | proliferation of | T. N. C. Wells, and C. A. Power. | |
| | CD34+ myeloid | © Humana Press Inc., | |
| | progenitor cells. | Totowa, NJ | |
| Fractalkine (neurotactin; | Fractalkine is | Fractalkine activity can be | Immune disorders; Leukemia; |
| chemokine CX3C) | believed to play a | determined using | Lymphoma; Bacterial or Yeast |
| | role in chemotactic | Chemotactic leukocyte | Infections |
| | leukocyte migration | migration assays known in the | |
| | and neurological | art, for example: J. Immunol. | |
| | disorders. | Methods 33, ((1980)); Nature | |
| | | 1997 Jun 5; 387(6633): 611-7. | |
| Oxyntomodulin | Stimulates insulin | The effect of oxyntomodulin | Most preferred: Hyperglycemia; |
| | secretion; stimulates | on insulin secretion can be | Obesity; Diabetes; Diabetes |
| | cAMP production; | measured by methods known | Insipidus; Diabetes mellitus; Type 1 |
| | inhibits meal- | in the art, including the MIN6 | diabetes; Type 2 diabetes; Insulin |
| | stimulated gastric | cell assay described in Ann. | resistance; Insulin deficiency; |
| | acid secretion; | NY Acad. Sci. 805: 44-51 | Hyperlipidemia; Hyperketonemia; |
| | regulates gut | (1996). | Non-insulin dependent Diabetes |
| | motility; inhibits | cAMP accumulation can be | Mellitus (NIDDM); Insulin- |
| | food intake, | measured using methods | dependent Diabetes Mellitus |
| | | known in the art, including | (IDDM); A Condition Associated |
| | | the in vitro assay described in | With Diabetes Including, But Not |
| | | Br J Pharmacol 138(4): 660-70 | Limited To Obesity, Heart Disease, |
| | | (2003). | Hyperglycemia, Infections, |
| | | | Retinopathy, And/Or Ulcers; |
| | | | Metabolic Disorders; Immune |
| | | | Disorders; Obesity; Vascular |
| | | | Disorders; Suppression of Body |
| | | | Weight; Suppression of Appetite; |
| | | | Syndrome X. |
| Killer Toxin; Killer Toxin | A killer toxin (KT) | Candidacidal activity can | Candidiasis |
| Peptide (KP) | produced by the yeast | measure in vitro using assays | |
| | Pichia anomala is a | known in the art, such as | |
| | glycoprotein capable | those disclosed by Magliani et | |
| | of killing other | al., Nat. Biotechnol. 1997; | |
| | microorganisms | 15: 155-158; or by Polonelli et | |
| | presenting specific | al, Clin. Diagn. Lab. | |
| | cell wall receptors | Immunol. 1997; 4: 142-146. | |
| | (KTR) and | | |
| | competing in natural | | |
| | habitats for the same | | |
| | ecological niche. | | |
| | Killer Toxin Peptide | | |
| | (KP) is a peptide | | |
| | derived from a | | |
| | recombinant | | |
| | antiidiotypic | | |
| | antibody, which | | |
| | retains killer toxin | | |
| | microbicidal activity, | | |
| | probably through the | | |
| | interaction with the | | |
| | beta-glucan killer | | |
| | toxin receptor on | | |
| | target microbial cells. | | |
| TIMP-4 (Tissue Inhibitor | The proteins encoded | TIMP inhibitory activity can | Anti-cancer applications; |
| of Metalloprotease) | by this gene family | be assayed using assays | Restenosis; Autoimmune Disorders; |
| | are natural inhibitors | known in the art, such as | Osteoarthritis |
| | of the matrix | those disclosed by Murphy et | |
| | metalloproteinases, a | al., Biochem J 1981 Apr | |
| | group of peptidases | 1; 195(1): 167-70; Suneel et | |
| | involved in | al., J Biol Chem 1995 Jun | |
| | degradation of the | 16; 270(24): 14313-8. | |
| | extracellular matrix. | | |
| PYY (Peptide YY, | Decreases appetite; | Appetite and food intake can | Most preferred: Treatment of |
| including PYY₃₋₃₆ | increases satiety; | be can be measured by | Obesity; treatment of Diabetes; |
| (amino acid residues 31-64 | decreases food | methods known in the art | suppression of body weight gain; |
| of full length PYY, | intake. | (Batterham et al. Nature | suppression of appetite. |
| amino acid residues 3-36 | | 2002; 418: 650654) | Hyperglycemia; Diabetes; Diabetes |
| of mature PYY); also | | | Insipidus; Diabetes mellitus; Type 1 |
| including PYY(3-36) | | | diabetes; Type 2 diabetes; Insulin |
| (G9R) (SEQ ID | | | resistance; Insulin deficiency; |
| NO: 780)) | | | Hyperlipidemia; Hyperketonemia; |
| | | | Non-insulin dependent Diabetes |
| | | | Mellitus (NIDDM); Insulin- |
| | | | dependent Diabetes Mellitus |
| | | | (IDDM); A Condition Associated |
| | | | With Diabetes Including, But Not |
| | | | Limited To Obesity, Heart Disease, |
| | | | Hyperglycemia, Infections, |
| | | | Retinopathy, And/Or Ulcers; |
| | | | Metabolic Disorders; Immune |
| | | | Disorders; Obesity; Vascular |
| | | | Disorders; Suppression of Body |
| | | | Weight; Suppression of Appetite; |
| | | | Syndrome X. |
| | | | Other indications for antibodies, |
| | | | antagonists: treatment of weight |
| | | | loss; treatment of AIDS wasting; |
| | | | appetite stimulant; treatment of |
| | | | cachexia. |
| Adrenomedullin | stimulates | Vasodilation can be measured | Treatment of Congestive Heart |
| | vasodilation; | using assays known in the art | Failure; Hypertension; Myocardial |
| | promotes bone | (Ashton et al. Pharmacology | Infarction; Septic Shock; |
| | growth. | 2000; 61(2): 101-105. The | Osteoporosis; Postmenopausal |
| | | promotion of bone growth | osteoporosis; Osteopenia. |
| | | can be measured using assays | |
| | | known in the art, such as the | |
| | | osteoblast proliferation assay | |
| | | (Cornish et al. Am J Physiol | |
| | | 1997 Dec; 273(6 Pt 1): E1113- | |
| | | 20). | |
| Ghrelin | Stimulates release of | Appetite and food intake can | Endocrine; loss of body weight; loss |
| | growth hormone | be can be measured by | of body weight associated with |
| | from anterior | methods known in the art | cancer or anorexia nervosa; loss of |
| | pituitary. Stimulates | (Batterham et al. Nature | appetite; excessive appetite; body |
| | appetite and reduces | 2002; 418: 650654) | weight gain; Obesity; Diabetes; |
| | fat burning. | | Acromegaly; Growth failure; |
| | | | Growth hormone deficiency; |
| | | | Growth failure and growth |
| | | | retardation Prader-Willi syndrome |
| | | | in children 2 years or older; Growth |
| | | | deficiencies; Growth failure |
| | | | associated with chronic renal |
| | | | insufficiency; Postmenopausal |
| | | | osteoporosis; burns; cachexia; |
| | | | cancer cachexia; dwarfism; |
| | | | metabolic disorders; obesity; renal |
| | | | failure; Turner's Syndrome, pediatric |
| | | | and adult; fibromyalgia; fracture |
| | | | treatment; frailty, AIDS wasting |
| Calcitonin gene-related | CGRP is a potent | The vasodilatory activity of | Migraine Headaches; Angina |
| peptide (CGRP) | vasodilator, and a | CGRP can be assayed using | Pectoris; Arrythmias; Heart Failure; |
| | regulator of | the aortic ring vasodilation | Hypertension; Postmenopausal |
| | endothelial and | assay described in Pharmacol | Osteoporosis; Raynaud's Disease; |
| | osteoblast cell | Res. 1999 Mar; 39(3): 217-20. | Subarachnoid Haemorrhage |
| | proliferation. | Endothelial and osteoblast | |
| | Additional effects of | cell proliferation activities | |
| | CGRP include | can be measured in vitro (Eur | |
| | reduced gastric | J Pharmacol. 2000 Dec | |
| | secretion, increased | 15; 409(3): 273-8; Proc Natl | |
| | body temperature, | Acad Sci USA 1990 | |
| | anorexic effects, and | May; 87(9): 3299-303) | |
| | positive inotropic and | | |
| | chronotropic effects | | |
| | on the heart | | |
| Insulin-like growth factor- | IGF-I is a pleiotropic | IGF-I activity may be assayed | Diabetes mellitus; Growth disorders; |
| 1 (Mecasermin; Somazon; | polypeptide with a | in vitro using an serum | Frailty; Amyotrophic lateral |
| IGF-1; IGF-1 complex; | wide range of actions | withdrawal apoptosis- | sclerosis; Osteoarthritis; Kidney |
| CEP 151; CGP 35126; FK | in both central and | protection assay. (J | disease & neuropathy; Dwarfism; |
| 780; Mecar; RHIGF-I; | peripheral nervous | Endocrinol 2000 Oct; | HIV-1 infections; Myocardial |
| Somatomedin-1; | sytems. It is involved | 167(1): 165-74). Proliferation | ischaemia; Osteoporosis; Multiple |
| Somatomedin-C; | in growth and | assay using breast carcinoma | sclerosis; Nerve disorders; Burns; |
| SOMATOKINE; | development and | cell line MCF-7 (Karey 1988 | diabetes; peripheral neuropathies |
| MYOTROPHIN; IGEF; | protects neurons | Cancer Res. 48: 4083) | |
| DepoIGF-1) | against cell death via | | |
| | the activation of | | |
| | intracellular | | |
| | pathways implicating | | |
| | phosphatidylinositide | | |
| | 3/Akt kinase. | | |
| Neuraminidase (Influenza | Neuraminidase is one | Neuraminidase activity can be | Vaccine or antigen against Influenza |
| A virus | of two glycoproteins | assayed in vitro using assays | A, strain H5N1; Avian Flu |
| (A/Goose/Guangdong/1/96 | on the surface of the | known in the art, such as | |
| (H5N1))) | Influenza virus | those disclosed by Van | |
| | which, as an antigen | Deusen et al., Avian Dis. | |
| | defines the particular | 1983 Jul-Sep; 27(3): 745-50; | |
| | strain of virus. The | or by Wetherall et al., J. Clin. | |
| | variation of | Microbiology 2003 Feb; | |
| | neuraminidase | 41(2): 742-750. | |
| | molecules over time | | |
| | permits the virus to | | |
| | evade human | | |
| | immune responses | | |
| | and therefore | | |
| | necessitates the | | |
| | formulation of a new | | |
| | vaccine each year. | | |
| | Neuraminidase | | |
| | cleaves the cellular- | | |
| | receptor sialic acid | | |
| | residues to which the | | |
| | newly formed | | |
| | particles are attached. | | |
| | This cleavage | | |
| | releases the viruses, | | |
| | which can now | | |
| | invade new cells. | | |
| | Without | | |
| | neuraminidase, | | |
| | infection would be | | |
| | limited to one round | | |
| | of replication, rarely | | |
| | enough to cause | | |
| | disease. | | |
| | Neuraminidase may | | |
| | also facilitate viral | | |
| | invasion of the upper | | |
| | airways, possibly by | | |
| | cleaving the sialic | | |
| | acid moieties on the | | |
| | mucin that bathes the | | |
| | airway epithelial | | |
| | cells. | | |
| Hemagglutinin [Influenza | Hemagglutinin (HA), | Complement Fixation (CF) | Vaccine or antigen against Influenza |
| A virus (A/Hong | the major influenza | and Hemagglutination | A, strain H5N1; Avian Flu |
| Kong/213/03(HK213: H5N1))] | virus surface | Inhibition (HI) can be assayed | |
| | glycoprotein, has two | in vitro using assays known in | |
| | functions in | the art, such as those | |
| | infection: (i) it binds | disclosed by Prince et al., | |
| | the virus to the | Clin. Diagn. Lab. Immunol. | |
| | cellular receptors, | 2003 May; 10(3): 481-482. | |
| | sialic acid residues of | | |
| | glycoproteins and | | |
| | glycolipids, and (ii) | | |
| | following | | |
| | endocytosis it | | |
| | mediates the low pH- | | |
| | induced fusion of | | |
| | viral and cellular | | |
| | membranes to permit | | |
| | entry of the viral | | |
| | genome into the cell. | | |
| | All influenza viruses | | |
| | bear two surface | | |
| | glycoproteins, a | | |
| | hemagglutinin and a | | |
| | neuraminidase, | | |
| | which are the | | |
| | antigens that define | | |
| | the particular strain | | |
| | of influenza. The | | |
| | variation of these | | |
| | molecules over time | | |
| | permits the virus to | | |
| | evade human | | |
| | immune responses | | |
| | and therefore | | |
| | necessitates the | | |
| | formulation of a new | | |
| | vaccine each year. | | |
| | The hemagglutinin is | | |
| | a sialic acid receptor- | | |
| | binding molecule and | | |
| | mediates entry of the | | |
| | virus into the target | | |
| | cell. | | |
| Butyrylcholinesterase | Butyrylcholinesterase | BchE activity assay | Detoxification for Cocaine |
| (BchE, Serum | accelerates cocaine | “Differential inhibition of | Overdose; suxamethonium |
| Cholinesterase, | metabolism: in vitro | human serum cholinesterase | sensitivity; apnea; |
| pseuocholinesterase E1 | and in vivo effects in | with fluoride: recognition of | |
| (CHE1)) | nonhuman primates | two new phenotypes.” Nature | |
| | and humans. | 191: 496-498, 1961. “A rare | |
| | Carmona GN, Jufer RA, | genetically determined variant | |
| | Goldberg SR, | of pseudocholinesterase in | |
| | Gorelick DA, Greig NH, | two German families with | |
| | Yu QS, Cone EJ, | high plasma enzyme activity.” | |
| | Schindler CW. | Europ. J. Biochem. 99: 65-69, | |
| | Drug Metab Dispos. | 1979. “Genetic analysis of a | |
| | 2000 Mar; 28(3): 367-71. | Japanese patient with | |
| | An atypical form of | butyrylcholinesterase | |
| | butyrylcholinesterase | deficiency.” Ann. Hum. | |
| | or the absence of its | Genet. 61: 491-496, 1997. | |
| | activity leads to | | |
| | prolonged apnea | | |
| | following | | |
| | administration of the | | |
| | muscle relaxant | | |
| | suxamethonium. The | | |
| | widespread | | |
| | expression of CHE1 | | |
| | in early | | |
| | differentiation | | |
| | suggests | | |
| | development-related | | |
| | functions for this | | |
| | protein. | | |
| Endothelin (ET-1; | Endothelin is a potent | Endothelin-1-induced | CHF, pulmonary hypertension, |
| Genbank Accession No. | vasoconstrictor. It is | vasoconstriction is mediated | hypertension, renal failure, any |
| NP_001946) | inappropriately | by Ca2+ influx through a | disease for which endothelin |
| | elevated in | non-selective cation channel. | antagonism would be beneficial, as |
| | hypertensive diseases | It is mediated by the | anti-angiogenic or anti-tumor agent |
| | and in heart failure. | endothelin receptors ETA and | for treatment of cancer and macular |
| | Potent agonist for the | ETB, both of which are G- | degeneration. |
| | ETA and ETB | protein-coupled receptors. | |
| | endothelin receptors. | Antagonists can be identified | |
| | Induces the | by their ability to prevent Ca− | |
| | production of | flux mediated by ET-1 | |
| | hypoxia-inducible | peptide, which can be assayed | |
| | factor 1α, and, thus, | in vitro using assays known in | |
| | the production of | art, such as disclosed in | |
| | VEGF. | Wong-Dusting et al, J. | |
| | | Cardiovasc. Pharmacol. | |
| | | (1991) 17: S236-S238; Ono et | |
| | | al., Nature (1994) 370: 252-253; | |
| | | Koyama, Y. et al., | |
| | | Neuroscience (2000) | |
| | | 101: 219-227; Russell, F. D. | |
| | | and Molenaar, P., Trends | |
| | | Pharmacol. Sci. (2000) | |
| | | 21: 353-359; Masaki, T. et al., | |
| | | Eur. J. Pharmacol. (1999) | |
| | | 375: 133-138; Inoue, A. et al., | |
| | | Proc. Natl. Acad. Sci. USA | |
| | | (1989) 86: 2863-2867; and | |
| | | Spinella, F. et al., J. Biol. | |
| | | Chem. (2002) 277: 27850-27855. | |
| Mechano Growth Factor | A muscle growth | Myoblast proliferation and | Wasting disease, cachexia, stroke, |
| (MGF; IGF-IEc; Genbank | factor that appears | differentiation can be assayed | MI, CHF, diseases where |
| Accession No. P05019) | lost with aging. Can | in vitro by assays known in | neuroprotection or muscle (skeletal |
| | also act as | the art such as disclosed in | or smooth) protection or |
| | neuroprotective | Dluzniewska et al, FASEB J. | regeneration would be beneficial. |
| | agent. Unlike mature | (2005) Sep 6; Goldspink G. J | |
| | IGF-I, MGF inhibits | Musculoskelet Neuronal | |
| | terminal | Interact. (2004) Jun; 4(2): 143-7; | |
| | differentiation whilst | or Yang SY and Goldspink G, | |
| | increasing myoblast | FEBS Lett. (2002) Jul 3, | |
| | proliferation. | 522(1-3): 156-60. | |

| Therapeutic Protein: X | Construct ID | Therapeutic Protein: Z |
|---|---|---|
| Interferon alpha | 2249, 2343, | See Table 2, |
| (Interferon alfa-2b; | 2366, 2381, | SEQ ID NO: Z |
| Interferon alfa-2a; | 2382, 2410, | for particular |
| recombinant; Interferon | 3165, 3422, | construct. |
| alfa-n1; Interferon alfa- | 3423, 3424, | |
| n3; Peginterferon alpha- | 3476, 3960, | |
| 2b; Ribavirin and | 4290, 4291, 4292, 4295, 4296. | |
| interferon alfa-2b; | | |
| Interferon alfacon-1; | | |
| interferon consensus; YM | | |
| 643; CIFN; interferon- | | |
| alpha consensus; | | |
| recombinant methionyl | | |
| consensus interferon; | | |
| recombinant consensus | | |
| interferon; CGP 35269; | | |
| RO 253036; RO 258310; | | |
| INTRON A; PEG- | | |
| INTRON; OIF; | | |
| OMNIFERON; PEG- | | |
| OMNIFERON; | | |
| VELDONA; PEG- | | |
| REBETRON; ROFERON | | |
| A; WELLFERON; | | |
| ALFERON N/LDO; | | |
| REBETRON; | | |
| ALTEMOL; | | |
| VIRAFERONPEG; | | |
| PEGASYS; | | |
| VIRAFERON; | | |
| VIRAFON; AMPLIGEN; | | |
| INFERGEN; INFAREX; | | |
| ORAGEN) | | |
| Atrial natriuretic peptide | 3484, 4174. | See Table 2, |
| (ANP; atrial natriuretic | | SEQ ID NO: Z |
| factor; ANF) | | for particular |
| | | construct. |
| B-type natriuretic peptide | 3618, 3689, | See Table 2, |
| (BNP, brain natriuretic | 3690, 3691, | SEQ ID NO: Z |
| peptide) | 3692, 3715, | for particular |
| | 3716, 3723, | construct. |
| | 3724, 3725, | |
| | 3736, 3741, | |
| | 3769, 3778, | |
| | 3783, 3795, | |
| | 3796, 3809, | |
| | 3896, 3897, | |
| | 3898, 3899, | |
| | 3900, 3956, | |
| | 3957, 3959, | |
| | 3961, 3962, | |
| | 3965, 3966, | |
| | 3967, 3968, | |
| | 4005, 4006, | |
| | 4007, 4062, | |
| | 4130, 4160, | |
| | 4161, 4167, | |
| | 4168, 4169, 4170, 4171, 4172, 4174. | |
| Long-acting natriuretic | 3886, 3887. | See Table 2, |
| peptide (LANP; proANP- | | SEQ ID NO: Z |
| (31-67); | | for particular |
| | | construct. |
| | | Also see, |
| | | Vesely Am J |
| | | Physiol Renal |
| | | Rhysiol 2003; |
| | | 285: F167-177 |
| | | which is |
| | | incorporated |
| | | by reference |
| Vessel Dialator (VDP; | 3888, 3889. | See Table 2, |
| proANP-(79-98)). | | SEQ ID NO: Z |
| | | for particular |
| | | construct. |
| | | Also see, |
| | | Vesely Am J |
| | | Physiol Renal |
| | | Rhysiol 2003; |
| | | 285: F167-177 |
| | | which is |
| | | hereby |
| | | incorporated |
| | | by reference |
| Kaliuretic Peptide (KUP; | 3890, 3891. | See Table 2, |
| proANP-(99-126)). | | SEQ ID NO: Z |
| | | for particular |
| | | construct. |
| | | Also see, |
| | | Vesely Am J |
| | | Physiol Renal |
| | | Rhysiol 2003; |
| | | 285: F167-177 |
| | | which is |
| | | hereby |
| | | incorporated |
| | | by reference |
| C-type Natriuretic Peptide | 3892, 3893. | See Table 2, |
| (CNP) | | SEQ ID NO: Z |
| | | for particular |
| | | construct. |
| | | Also see, |
| | | Vesely Am J |
| | | Physiol Renal |
| | | Rhysiol 2003; |
| | | 285: F167-177 |
| | | which is |
| | | hereby |
| | | incorporated |
| | | by reference |
| Dendroaspis natriuretic | 3894, 3895. | See Table 2, |
| peptide (DNP) | | SEQ ID NO: Z |
| | | for particular |
| | | construct. |
| | | Also see, |
| | | Vesely Am J |
| | | Physiol Renal |
| | | Rhysiol 2003; |
| | | 285: F167-177 |
| | | which is |
| | | hereby |
| | | incorporated |
| | | by reference |
| Beta defensin-2 (beta | 4173, 4175, | See Table 2, |
| defensin 4; SAP1; | 4176, 4177, | SEQ ID NO: Z |
| DEFB2; HBD-2; DEFB- | 4178, 4179, | for particular |
| 2; DEFB 102; skin- | 4180, 4181 | construct. |
| antimicrobial peptide 1) | | |
| Human chemokine HCC- | 1933, 1934, | See Table 2, |
| 1 (ckBeta-1; CKB-1; | 1947, 1948, | SEQ ID NO: Z |
| HWFBD) | 1955, 1998, | for particular |
| | 2355, 2412, | construct. |
| | 2449, 2837, | |
| | 2838, 2839, | |
| | 2840, 2841, | |
| | 2842, 2843, | |
| | 2844, 2845, | |
| | 2849, 2947, | |
| | 3066, 3105, | |
| | 3124, 3125, | |
| | 3139, 3152, | |
| | 3153, 3154, | |
| | 3155, 3156, | |
| | 3169, 3170, | |
| | 3202, 3203, | |
| | 3204, 3205, | |
| | 3206, 3207, | |
| | 3272, 3970. | |
| Fractalkine (neurotactin; | 4191, 4192, | See Table 2, |
| chemokine CX3C) | 4193, 4194. | SEQ ID NO: Z |
| | | for particular |
| | | construct |
| Oxyntomodulin | 3579, 3580, | See, Table 2, |
| | 4213, 4215, | SEQ ID NO: Z |
| | 4217, 4232, | for particular |
| | 4240, 4253. | construct |
| Killer Toxin; Killer Toxin | 4227 | See, Table 2, |
| Peptide (KP) | | SEQ ID NO: Z |
| | | for particular |
| | | construct |
| TIMP-4 (Tissue Inhibitor | 4233, 4234, | See Table 2, |
| of Metalloprotease) | 4273, 4274 | SEQ ID NO: Z |
| | | for particular |
| | | construct |
| PYY (Peptide YY, | 3108, 3109, | See Table 2, |
| including PYY₃₋₃₆ | 3281, 3117, | SEQ ID NO: Z |
| (amino acid residues 31-64 | 3118, 3282, | for particular |
| of full length PYY, | 4215, 4235, | construct. |
| amino acid residues 3-36 | 4236, 4262, | |
| of mature PYY); also | 4267. | |
| including PYY(3-36) | | |
| (G9R) (SEQ ID | | |
| NO: 780)) | | |
| Adrenomedullin | 3144, 4239, | See Table 2, |
| | 4260, 4261. | SEQ ID NO: Z |
| | | for particular |
| | | construct |
| Ghrelin | 4241, 4242, | See Table 2, |
| | 4268. | SEQ ID NO: Z |
| | | for particular |
| | | construct. |
| Calcitonin gene-related | 4246, 4247, | See Table 2, |
| peptide (CGRP) | 4248, 4249. | SEQ ID NO: Z |
| | | for particular |
| | | construct. |
| Insulin-like growth factor- | 4251, 4252. | See Table 2, |
| 1 (Mecasermin; Somazon; | | SEQ ID NO: Z |
| IGF-1; IGF-1 complex; | | for particular |
| CEP 151; CGP 35126; FK | | construct. |
| 780; Mecar; RHIGF-I; | | |
| Somatomedin-1; | | |
| Somatomedin-C; | | |
| SOMATOKINE; | | |
| MYOTROPHIN; IGEF; | | |
| DepoIGF-1) | | |
| Neuraminidase (Influenza | 4254, 4255 | See Table 2, |
| A virus | | SEQ ID NO: Z |
| (A/Goose/Guangdong/1/96 | | for particular |
| (H5N1))) | | construct. |
| Hemagglutinin [Influenza | 4256, 4257. | See Table 2, |
| A virus (A/Hong | | SEQ ID NO: Z |
| Kong/213/03(HK213: H5N1))] | | for particular |
| | | construct. |
| Butyrylcholinesterase | 4258, 4259. | See Table 2, |
| (BchE, Serum | | SEQ ID NO: Z |
| Cholinesterase, | | for particular |
| pseuocholinesterase E1 | | construct. |
| (CHE1)) | | |
| Endothelin (ET-1; | | SEQ ID NOs: |
| Genbank Accession No. | | 781 and 782. |
| NP_001946) | | |
| Mechano Growth Factor | | SEQ ID NOs: |
| (MGF; IGF-IEc; Genbank | | 783 and 784. |
| Accession No. P05019) | | |

[0080] TABLE 2

| Fusion | Construct | | | Expression | SEQ ID NO: | SEQ ID NO: | SEQ ID NO: | SEQ ID NO: | SEQ ID NO: | Leader |
|---|---|---|---|---|---|---|---|---|---|---|
| No. | ID | Construct Name | Description | Vector | Y | X | Z | A | B | Sequence |
| 1 | 3422 | pSAC35:APsp.HSA.IFNa | Acid Phosphatase signal peptide | pSAC35 | 192 | 117 | 267 | 342 | 343 | Acid |
| | | | followed by mature HSA and | | | | | | | phoshpatase |
| | | | IFNa. | | | | | | | |
| 2 | 3423 | pSAC35:INVsp.HSA. | Invertase signal peptid followed | pSAC35 | 193 | 118 | 268 | 344 | 345 | Invertase |
| | | IFNa | by mature HSA and IFNa. | | | | | | | |
| 3 | 3424 | pSAC35:KTsp.HSA.IFNa | Killer Toxin signal peptide | pSAC35 | 194 | 119 | 269 | 346 | 347 | Killer toxin |
| | | | followed by mature HSA and | | | | | | | |
| | | | IFNa. | | | | | | | |
| 4 | 2249 | pSAC35:IFNa2-HSA | Mature IFNa2 fused upstream of | pSAC35 | 195 | 120 | 270 | 348 | 349 | HSA/kex2 |
| | | also named: | mature HSA and downstream of | | | | | | | |
| | | pSAC23:IFNα2-HSA | HSA/kex2 leader sequence. | | | | | | | |
| 5 | 2343 | pSAC35.INV- | Mature Interferon alpha2 fused | pSAC35 | 196 | 121 | 271 | 350 | 351 | invertase |
| | | IFNA2.HSA | upstream of mature HSA and | | | | | | | |
| | | | downstream of invertase signal | | | | | | | |
| | | | peptide. | | | | | | | |
| 6 | 2366 | pSAC35.MAF- | Mature IFNa2 fused upstream of | pSAC35 | 197 | 122 | 272 | 352 | 353 | MFα-1 |
| | | IFNa2.HSA | mature HSA and downstream of | | | | | | | |
| | | | yeast mating factor alpha leader | | | | | | | |
| | | | sequence. | | | | | | | |
| 7 | 2381 | pC4:HSA- | Amino acids C17 to E181 of | pC4 | 198 | 123 | 273 | 354 | 355 | HSA |
| | | IFNa2(C17-E181) | IFNa2 (fragment shown as amino | | | | | | | |
| | | | acids C1 to E165 of SEQ ID | | | | | | | |
| | | | NO: 273) fused downstream of | | | | | | | |
| | | | HSA. | | | | | | | |
| 8 | 2382 | pC4:IFNa2-HSA | IFNa2 fused upstream of mature | pC4 | 199 | 124 | 274 | 356 | 357 | Native |
| | | | HSA. | | | | | | | IFNα2 |
| | | | | | | | | | | leader |
| 9 | 2410 | pSAC35INV:IFNa- | Mature IFNa2 fused downstream | pSAC35 | 200 | 125 | 275 | 358 | 359 | invertase |
| | | HSA | of the invertase signal peptide | | | | | | | |
| | | | and upstream of mature HSA. | | | | | | | |
| 10 | 3165 | pSAC35:HSA.IFNa | HSA fused upstream of IFNα and | pSAC35 | 201 | 126 | 276 | None | None | HSA/kex2 |
| | | also named CID | downstream of the HSA/kex2 | | | | | | | |
| | | 3165, | leader. | | | | | | | |
| | | pSAC35:HSA.INFa | | | | | | | | |
| 11 | 3476 | pSAC35:G19Rsp.HSA. | The Modified HSA/kex2 signal | pSAC35 | 202 | 127 | 277 | 360 | 361 | Modified |
| | | IFNa | sequence followed by mature | | | | | | | HSA/Kex2 |
| | | | HSA followed by INF-alpha. | | | | | | | |
| 12 | 3690 | pC4:MPIFSP.BNP/HSA | Myeloid progenitor inhibitory | pC4 | 203 | 128 | 278 | 362 | 363 | MPIF-1 |
| | | | factor-1 (MPIF) signal sequence | | | | | | | |
| | | | followed by BNP fused to the N- | | | | | | | |
| | | | terminus of mature HSA. | | | | | | | |
| 13 | 3691 | pC4:SPCON.BNP/HSA | A consensus signal sequence | pC4 | 204 | 129 | 279 | 364 | 365 | Consensus |
| | | | followed by BNP fused to the N- | | | | | | | |
| | | | terminus of mature HSA. | | | | | | | |
| 14 | 3715 | pSAC35:BNP29/HSA. | A single copy of human BNP | pSAC35 | 205 | 130 | 280 | 366 | 367 | HSA/Kex2 |
| | | S65 | (amino acids 1-29) fused to the | | | | | | | |
| | | | N-terminus of HSA (S65-L585), | | | | | | | |
| | | | an HSA N-terminal truncation | | | | | | | |
| | | | (delta 1-64). This is downstream | | | | | | | |
| | | | of the HSA/Kex2 signal | | | | | | | |
| | | | sequence. | | | | | | | |
| 15 | 3723 | pEE12.1:MPIFSP.BNP/ | Myeloid progenitor inhibitory | pEE12.1 | 206 | 131 | 281 | None | None | MPIF-1 |
| | | HSA | factor-1 (MPIF) signal sequence | | | | | | | |
| | | | followed by BNP fused to the N- | | | | | | | |
| | | | terminus of mature HSA. | | | | | | | |
| 16 | 3724 | pEE12.1:SPCON.BNP/ | A consensus signal sequence | pEE12.1 | 207 | 132 | 282 | None | None | Consensus |
| | | HSA | followed by BNP fused to the N- | | | | | | | |
| | | | terminus of mature HSA. | | | | | | | |
| 17 | 3725 | pEE12.1:SPCON2.BNP/ | A consensus signal sequence | pEE12.1 | 208 | 133 | 283 | None | None | Consensus |
| | | HSA | followed by BNP fused to the N- | | | | | | | Signal |
| | | | terminus of mature HSA. | | | | | | | Peptide #2 |
| 18 | 3736 | pC4:SPCON2.BNP/ | A consensus signal sequence | pC4 | 209 | 134 | 284 | 368 | 369 | Consensus |
| | | HSA | followed by BNP fused to the N- | | | | | | | Signal |
| | | | terminus of mature HSA. | | | | | | | Peptide #2 |
| 19 | 3769 | pC4:BNP(R13G)/HSA | Myeloid progenitor inhibitory | pC4 | 210 | 135 | 285 | 370 | 371 | MPIF-1 |
| | | | factor-1 (MPIF) signal sequence | | | | | | | |
| | | | followed by BNP mutant (R13G) | | | | | | | |
| | | | fused to the N-terminus of mature | | | | | | | |
| | | | HSA. | | | | | | | |
| 20 | 3778 | pC4:SPCON.BNP29/ | A single copy of human BNP (1- | pC4 | 211 | 136 | 286 | 372 | 373 | Consensus |
| | | HSA.S65 | 29) fused to the N-terminus of | | | | | | | |
| | | | HSA (S65-L585), an HSA N- | | | | | | | |
| | | | terminal truncation (delta 1-64). | | | | | | | |
| | | | This is downstream of a | | | | | | | |
| | | | consensus signal sequence. | | | | | | | |
| 21 | 3783 | pC4:SPCON.BNP(R13G)/ | Consensus signal sequence | pC4 | 212 | 137 | 287 | 374 | 375 | Consensus |
| | | HSA | followed by BNP mutant (R13G) | | | | | | | |
| | | | fused to the N-terminus of mature | | | | | | | |
| | | | HSA. | | | | | | | |
| 22 | 3795 | pC4:SPCON.BNP(K14G)/ | Consensus signal sequence | pC4 | 213 | 138 | 288 | 376 | 377 | Consensus |
| | | HSA | followed by BNP mutant (K14G) | | | | | | | |
| | | | fused to the N-terminus of mature | | | | | | | |
| | | | HSA. | | | | | | | |
| 23 | 3796 | pSAC35:HSA/BNP | Followed by mature HSA fused | pSAC35 | 214 | 139 | 289 | 378 | 379 | HSA/Kex2 |
| | | | to the N-terminus of BNP. | | | | | | | |
| 24 | 3809 | pSAC35:BNP30(GGG)/ | HSA/Kex2 signal sequence | pSAC35 | 215 | 140 | 290 | 380 | 381 | HSA/Kex2 |
| | | HSA | followed by BNP (amino acids 1- | | | | | | | |
| | | | 30) fused via tripartite glycines to | | | | | | | |
| | | | the N-terminus of mature HSA. | | | | | | | |
| 25 | 3886 | pSAC35:HSA/KEX2. | HSA/Kex2 signal sequence | pSAC35 | 216 | 141 | 291 | None | None | HSA/Kex2 |
| | | LANP.HSA | followed by LANP fused to the | | | | | | | |
| | | | N-terminus of mature HSA. | | | | | | | |
| | | | LANP corresponds to amino | | | | | | | |
| | | | acids 26-55 of SeqID No: 291 | | | | | | | |
| | | | (hereby referred to as LANP). | | | | | | | |
| 26 | 3887 | pSAC35:HSA/KEX2. | HSA/Kex2 signal sequence | pSAC35 | 217 | 142 | 292 | None | None | HSA/Kex2 |
| | | HSA.LANP | followed by mature HSA fused to | | | | | | | |
| | | | the N-terminus of mature LANP. | | | | | | | |
| 27 | 3888 | pSAC35:HSA/KEX2. | HSA/Kex2 signal sequence | pSAC35 | 218 | 143 | 293 | None | None | HSA/Kex2 |
| | | VDP.HSA | followed by VDP fused to the N- | | | | | | | |
| | | | terminus of mature HSA. VDP | | | | | | | |
| | | | corresponds to amino acids 56-92 | | | | | | | |
| | | | of SeqID No: 293 (hereby referred | | | | | | | |
| | | | to as VDP). | | | | | | | |
| 28 | 3889 | pSAC35:HSA/KEX2 | HSA/Kex2 signal sequence | pSAC35 | 219 | 144 | 294 | None | None | HSA/Kex2 |
| | | HSA.VDP | followed by mature HSA fused to | | | | | | | |
| | | | the N-terminus of mature VDP. | | | | | | | |
| 29 | 3890 | pSAC35:HSA/KEX2. | HSA/Kex2 signal sequence | pSAC35 | 220 | 145 | 295 | None | None | HSA/Kex2 |
| | | KUP.HSA | followed by KUP fused to the N- | | | | | | | |
| | | | terminus of mature HSA. KUP | | | | | | | |
| | | | corresponds to amino acids 104-123 | | | | | | | |
| | | | of SeqID No: 295 (hereby | | | | | | | |
| | | | referred to as KUP). | | | | | | | |
| 30 | 3891 | pSAC35:HSA/KEX2. | HSA/Kex2 signal sequence | pSAC35 | 221 | 146 | 296 | None | None | HSA/Kex2 |
| | | HSA.KUP | followed by mature HSA fused to | | | | | | | |
| | | | the N-terminus of mature KUP. | | | | | | | |
| 31 | 3892 | pSAC35:HSA/KEX2. | HSA/Kex2 signal sequence | pSAC35 | 222 | 147 | 297 | None | None | HSA/Kex2. |
| | | CNP.HSA | followed by CNP fused to the N- | | | | | | | |
| | | | terminus of mature HSA. CNP | | | | | | | |
| | | | corresponds to amino acids 105-123 | | | | | | | |
| | | | of SeqID No: 297 (hereby | | | | | | | |
| | | | referred to as KUP). | | | | | | | |
| 32 | 3893 | pSAC35:HSA/KEX2. | HSA/Kex2 signal sequence | pSAC35 | 223 | 148 | 298 | None | None | HSA/Kex2 |
| | | HSA.CNP | followed by mature HSA fused to | | | | | | | |
| | | | the N-terminus of mature CNP. | | | | | | | |
| 33 | 3894 | pSAC35:HSA/KEX2. | HSA/Kex2 signal sequence | pSAC35 | 224 | 149 | 299 | None | None | HSA/Kex2 |
| | | DNP.HSA | followed by DNP fused to the N- | | | | | | | |
| | | | terminus of mature HSA. | | | | | | | |
| 34 | 3895 | pSAC35:HSA/KEX2. | HSA/Kex2 signal sequence | pSAC35 | 225 | 150 | 300 | None | None | HSA/Kex2 |
| | | HSA.DNP | followed by mature HSA fused to | | | | | | | |
| | | | the N-terminus of mature DNP. | | | | | | | |
| 35 | 3618 | pC4:SPCON.BNP1-32 | A consensus signal sequence | pC4 | 226 | 151 | 301 | 382 | 383 | Consensus |
| | | (2x)/HSA | followed by two, tandem copies | | | | | | | |
| | | | of mature BNP fused to the N- | | | | | | | |
| | | | terminus of mature HSA. | | | | | | | |
| 36 | 3484 | pSAC35:ANP/HSA | HSA/kex2 leader followed by | pSAC35 | 227 | 152 | 302 | 384 | 385 | HSA/kex2 |
| | | | atrial natriuretic peptide followed | | | | | | | |
| | | | by mature HSA. | | | | | | | |
| 37 | 1933 | pSAC35:HCC- | Amino acids T20 to N93 of | pSAC35 | 228 | 153 | 303 | 386 | 387 | HSA/kex2 |
| | | 1.T20-N93:HSA | HCC-1 fused upstream of mature | | | | | | | |
| | | | HSA and downstream of the | | | | | | | |
| | | | HSA/kex2 leader sequence. | | | | | | | |
| 38 | 1934 | pSAC35:HCC- | Amino acids T20 to N93 of | pSAC35 | 229 | 154 | 304 | 388 | 389 | HSA/kex2 |
| | | 1C.O.T20-N93:HSA | HCC-1 fused upstream of mature | | | | | | | |
| | | | HSA and downstream of the | | | | | | | |
| | | | HSA/kex2 leader sequence. DNA | | | | | | | |
| | | | sequence is codon optimized for | | | | | | | |
| | | | yeast expression. | | | | | | | |
| 39 | 1947 | pSAC35:d8HCC- | Amino acids G28 to N93 of | pSAC35 | 230 | 155 | 305 | 390 | 391 | HSA/kex2 |
| | | 1.G28-N93:HSA | HCC-1 fused upstream of mature | | | | | | | |
| | | | HSA and downstream of | | | | | | | |
| | | | HSA/kex2 leader sequence. | | | | | | | |
| 40 | 1948 | pSAC35:d8HCC- | Amino acids G28 to N93 of | pSAC35 | 231 | 156 | 306 | 392 | 393 | HSA/kex2 |
| | | 1C.O.G28-N93:HSA | HCC-1 fused upstream of mature | | | | | | | |
| | | | HSA and downstream of | | | | | | | |
| | | | HSA/kex2 leader sequence. DNA | | | | | | | |
| | | | sequence is codon optimized for | | | | | | | |
| | | | yeast expression. | | | | | | | |
| 41 | 1955 | pSAC35:t9HCC- | Amino acids G28 to N93 of | pSAC35 | 232 | 157 | 307 | 394 | 395 | HSA/kex2 |
| | | 1.G28-N93:spcHSA | HCC-1 fused upstream of a 16 | | | | | | | |
| | | | amino acid spacer and mature | | | | | | | |
| | | | HSA and downstream of | | | | | | | |
| | | | HSA/kex2 leader sequence. | | | | | | | |
| 42 | 1998 | pC4:CKB1.G28-N93. | Amino acids G28 to N93 of | pC4 | 233 | 158 | 308 | 396 | 397 | HSA |
| | | HSA | CkBeta1 fused upstream of | | | | | | | |
| | | | mature HSA and downstream of | | | | | | | |
| | | | the HSA leader sequence. | | | | | | | |
| 43 | 2355 | pSAC35:MATalpha. | Amino acids G28 to N93 of | pSAC35 | 234 | 159 | 309 | 398 | 399 | MFα-1 |
| | | d8ckbeta1.G28-N93: | Ckbeta1 fused upstream of | | | | | | | |
| | | HSA | mature HSA and downstream of | | | | | | | |
| | | | the yeast mating factor alpha | | | | | | | |
| | | | leader sequence. | | | | | | | |
| 44 | 2412 | pSAC35:delKEX.d8ckbeta1. | Amino acids G28 to N93 of | pSAC35 | 235 | 160 | 310 | 400 | 401 | HSA minus |
| | | G28-N93: | Ckbeta1 fused downstream of the | | | | | | | the KEX |
| | | HSA | HSA signal sequence (with the | | | | | | | site |
| | | | KEX site deleted - last 6 amino | | | | | | | |
| | | | acids of the leader) and upstream | | | | | | | |
| | | | of mature HSA. | | | | | | | |
| 45 | 2449 | pSAC35:INV.d8CKB1. | Amino acids G28 to N93 of | pSAC35 | 236 | 161 | 311 | 402 | 403 | Invertase |
| | | G28-N93:HSA | Ckbeta1 fused downstream of the | | | | | | | |
| | | | invertase signal peptide and | | | | | | | |
| | | | upstream of mature HSA. | | | | | | | |
| 46 | 2837 | pSAC35:CKB1.K21-N93: | K21-N93 of CKB1 (fragment | pScCHSA | 237 | 162 | 312 | 404 | 405 | HSA/kex2 |
| | | HSA | shown as K2 to N74 of SEQ ID | | | | | | | |
| | | | NO: 1735) fused downstream of | | | | | | | |
| | | | the HSA/kex2 leader and | | | | | | | |
| | | | upstream of mature HSA. | | | | | | | |
| 47 | 2838 | pSAC35:CKB1.T22-N93: | T22-N93 of CKB1 (fragment | pScCHSA | 238 | 163 | 313 | 406 | 407 | HSA/kex2 |
| | | HSA | shown as T3 to N74 of SEQ ID | | | | | | | |
| | | | NO: 1736) fused downstream of | | | | | | | |
| | | | the HSA/kex2 leader and | | | | | | | |
| | | | upstream of mature HSA. | | | | | | | |
| 48 | 2839 | pSAC35:CKB1.E23-N93: | E23-N93 of CKB1 (fragment | pScCHSA | 239 | 164 | 314 | 408 | 409 | HSA/kex2 |
| | | HSA | shown as E4 to N74 of SEQ ID | | | | | | | |
| | | | NO: 1737) fused downstream of | | | | | | | |
| | | | the HSA/kex2 leader and | | | | | | | |
| | | | upstream of mature HSA. | | | | | | | |
| 49 | 2840 | pSAC35:CKB1.S24-N93: | S24-N93 of CKB1 (fragment | pScCHSA | 240 | 165 | 315 | 410 | 411 | HSA/kex2 |
| | | HSA | shown as S5 to N74 of SEQ ID | | | | | | | |
| | | | NO: 1738) fused downstream of | | | | | | | |
| | | | the HSA/kex2 leader and | | | | | | | |
| | | | upstream of mature HSA. | | | | | | | |
| 50 | 2841 | pSAC35:CKB1.S25-N93: | S25-N93 of CKB1 (fragment | pScCHSA | 241 | 166 | 316 | 412 | 413 | HSA/kex2 |
| | | HSA | shown as S6 to N74 of SEQ ID | | | | | | | |
| | | | NO: 1739) fused downstream of | | | | | | | |
| | | | the HSA/kex2 leader and | | | | | | | |
| | | | upstream of mature HSA. | | | | | | | |
| 51 | 2842 | pSAC35:CKB1.S26-N93: | S26-N93 of CKB1 (fragment | pScCHSA | 242 | 167 | 317 | 414 | 415 | HSA/kex2 |
| | | HSA | shown as S7 to N74 of SEQ ID | | | | | | | |
| | | | NO: 1740) fused downstream of | | | | | | | |
| | | | the HSA/kex2 leader and | | | | | | | |
| | | | upstream of mature HSA. | | | | | | | |
| 52 | 2843 | pSAC35:CKB1.R27-N93: | R27-N93 of CKB1 (fragment | pScCHSA | 243 | 168 | 318 | 416 | 417 | HSA/kex2 |
| | | HSA | shown as R8 to N74 of SEQ ID | | | | | | | |
| | | | NO: 1741) fused downstream of | | | | | | | |
| | | | the HSA/kex2 leader and | | | | | | | |
| | | | upstream of mature HSA. | | | | | | | |
| 53 | 2844 | pSAC35:CKB1.P29-N93: | P29-N93 of CKB1 (fragment | pScCHSA | 244 | 169 | 319 | 418 | 419 | HSA/kex2 |
| | | HSA | shown as P10 to N74 of SEQ ID | | | | | | | |
| | | | NO: 1742) fused downstream of | | | | | | | |
| | | | the HSA/kex2 leader and | | | | | | | |
| | | | upstream of mature HSA. | | | | | | | |
| 54 | 2845 | pSAC35:CKB1.Y30-N93: | Y30-N93 of CKB1 (fragment | pScCHSA | 245 | 170 | 320 | 420 | 421 | HSA/kex2 |
| | | HSA | shown as Y11 to N74 of SEQ ID | | | | | | | |
| | | | NO: 1743) fused downstream of | | | | | | | |
| | | | the HSA/kex2 leader and | | | | | | | |
| | | | upstream of mature HSA. | | | | | | | |
| 55 | 2849 | pC4.MPIFsp.CKB1. | G28-N93 of CKB1 (fragment | pC4 | 246 | 171 | 321 | 422 | 423 | MPIF |
| | | G28-N93.HSA | shown as G9 to N74 of SEQ ID | | | | | | | |
| | | | NO: 1744) fused downstream of | | | | | | | |
| | | | the MPIF signal peptide and | | | | | | | |
| | | | upstream of mature HSA. | | | | | | | |
| 56 | 2947 | pSAC:CKb- | Invertase signal peptide followed | pSAC35 | 247 | 172 | 322 | 424 | 425 | Invertase |
| | | 1δ8(x2).HSA | by amino acids G28-N93 of full | | | | | | | |
| | | | length CKβ1 (SEQ IDNO: 1769), | | | | | | | |
| | | | tandemly repeated, followed by | | | | | | | |
| | | | mature HSA. | | | | | | | |
| 57 | 3066 | pSAC35:CKB- | Invertase signal peptide followed | pScCHSA | 248 | 173 | 323 | 426 | 427 | invertase |
| | | 1d8.GLP-1(7-36). | by amino acids G28-N93 of full | | | | | | | |
| | | HSA | length CKβ1 (SEQ IDNO: 1788), | | | | | | | |
| | | | followed by GLP-1(7-36), | | | | | | | |
| | | | followed by mature HSA. | | | | | | | |
| 58 | 3105 | pSAC35:INV.t9HCC- | Invertase signal peptide followed | pSAC35 | 249 | 174 | 324 | 428 | 429 | Invertase |
| | | 1.G28-N93:spc.HSA | by amino acids G28 to N93 of | | | | | | | |
| | | | HCC-1 fused upstream of a | | | | | | | |
| | | | spacer and mature HSA. | | | | | | | |
| 59 | 3124 | pSAC35:INV.CKB1. | Invertase signal peptide followed | pSAC35 | 250 | 175 | 325 | 430 | 431 | invertase |
| | | P29-N93:HSA | by amino acids 29 to 93 of full | | | | | | | |
| | | | length ckbeta1 fused to N- | | | | | | | |
| | | | terminus of HSA. | | | | | | | |
| 60 | 3125 | pSAC35:INV.CKb- | Invertase signal peptide followed | pSAC35 | 251 | 176 | 326 | 432 | 433 | invertase |
| | | 1.R27-N93:HSA | by amino acids 27 to 93 of full | | | | | | | |
| | | | length ckbeta1 fused to N- | | | | | | | |
| | | | terminus of HSA. | | | | | | | |
| 61 | 3139 | pSAC35:INV.CKB1. | Invertase signal peptide followed | pSAC35 | 252 | 177 | 327 | 434 | 435 | Invertase |
| | | G28-N93. | by amino acids G28-N93 of full | | | | | | | |
| | | DAHK.HSA | length CKβ1 (see, e.g, SEQ | | | | | | | |
| | | | IDNO: 1788), followed by a 16 | | | | | | | |
| | | | amino acid linker derived from | | | | | | | |
| | | | the N-terminus of HSA, followed | | | | | | | |
| | | | by mature HSA. | | | | | | | |
| 62 | 3152 | pSAC35:INV.CKB1. | Invertase signal peptide followed | pSAC35 | 253 | 178 | 328 | 436 | 437 | invertase |
| | | Met.R27-N93.HSA | by a Met, followed by amino | | | | | | | |
| | | | acids R27-N93 of full length | | | | | | | |
| | | | CKβ1, followed by mature HSA. | | | | | | | |
| 63 | 3153 | pSAC35:INV.CKB1. | Invertase signal peptide followed | pSAC35 | 254 | 179 | 329 | 438 | 439 | Invertase |
| | | Met.S26-N93.HSA | by a Met, followed by amino | | | | | | | |
| | | | acids S26-N93 of full length | | | | | | | |
| | | | CKβ1, followed by mature HSA. | | | | | | | |
| 64 | 3154 | pSAC35:INV.CKB1. | Invertase signal peptide followed | pSAC35 | 255 | 180 | 330 | 440 | 441 | invertase |
| | | Met.S25-N93.HSA | by a Met, followed by amino | | | | | | | |
| | | | acids S25-N93 of full length | | | | | | | |
| | | | CKβ1, followed by mature HSA. | | | | | | | |
| 65 | 3155 | pSAC35:INV.CKB1. | Invertase signal peptide followed | pSAC35 | 256 | 181 | 331 | 442 | 443 | invertase |
| | | Met.G28-N93.HSA | by a Met, followed by amino | | | | | | | |
| | | | acids G28-N93 of full length | | | | | | | |
| | | | CKβ1, followed by mature HSA. | | | | | | | |
| 66 | 3156 | pSAC35:INV.CKB1. | Invertase signal peptide followed | pSAC35 | 257 | 182 | 332 | 444 | 445 | invertase |
| | | Met.P29-N93.HSA | by a Met, followed by amino | | | | | | | |
| | | | acids P29-N93 of full length | | | | | | | |
| | | | CKβ1, followed by mature HSA. | | | | | | | |
| 67 | 3169 | pSAC35:KT.CKB1. | Killer toxin signal sequence fused | pSAC35 | 258 | 183 | 333 | None | None | Killer toxin |
| | | G28-N93.HSA | upstream of amino acids G28 | | | | | | | |
| | | | through N93 of CKB1 (fragment | | | | | | | |
| | | | shown as amino acids G1 to N66 | | | | | | | |
| | | | of SEQ ID NO: 1822) and mature | | | | | | | |
| | | | HSA. | | | | | | | |
| 68 | 3170 | pSAC35:KT.HA.CK | Killer toxin signal sequence | pSAC35 | 259 | 184 | 334 | None | None | Killer toxin |
| | | B1.G28-N93.HSA | followed by HA dipeptide and | | | | | | | |
| | | | amino acids G28 through N93 of | | | | | | | |
| | | | CKB1 (fragment shown as amino | | | | | | | |
| | | | acids G1 to N66 of SEQ ID | | | | | | | |
| | | | NO: 1823) and mature HSA. | | | | | | | |
| 69 | 3202 | pSAC35:API.d8CKb1/ | HSA/kex2 leader followed by | pSAC35 | 260 | 185 | 335 | 446 | 447 | HSA/kex2 |
| | | HSA | amino acids “API” followed by | | | | | | | |
| | | | d8CKb1 and mature HSA. The | | | | | | | |
| | | | sequence of delta 8 for CKB1 is | | | | | | | |
| | | | shown in SEQ ID NO: 1833. | | | | | | | |
| 70 | 3203 | pSAC35:ASL.d8CKb1/ | HSA/kex2 leader followed by | pSAC35 | 261 | 186 | 336 | 448 | 449 | HSA/kex2 |
| | | HSA | amino acids “ASL” followed by | | | | | | | |
| | | | d8CKb1 and mature HSA. | | | | | | | |
| 71 | 3204 | pSAC35:SPY.d8CKb1/ | HSA/kex2 leader followed by | pSAC35 | 262 | 187 | 337 | 450 | 451 | HSA/kex2 |
| | | HSA | amino acids “SPY” followed by | | | | | | | |
| | | | d8CKb1 and mature HSA. | | | | | | | |
| 72 | 3205 | pSAC35:MSPY.d8CKb1/ | HSA/kex2 leader followed by | pSAC35 | 263 | 188 | 338 | 452 | 453 | HSA/kex2 |
| | | HSA | amino acids “MSPY” followed | | | | | | | |
| | | | by d8CKb1 and mature HSA. | | | | | | | |
| 73 | 3206 | pSAC35:CPYSC.d8CKb1/ | HSA/kex2 leader followed by a | pSAC35 | 264 | 189 | 339 | 454 | 455 | HSA/kex2 |
| | | HSA | five amino acid linker followed | | | | | | | |
| | | | by d8CKb1 and mature HSA. | | | | | | | |
| 74 | 3207 | pSAC35:GPY.d8CKb1/ | HSA/kex2 leader followed by | pSAC35 | 265 | 190 | 340 | 456 | 457 | HSA/kex2 |
| | | HSA | amino acids “GPY” followed by | | | | | | | |
| | | | d8CKb1 and mature HSA. | | | | | | | |
| 75 | 3272 | pSAC35.INV:{D}8CK | CKbeta-1 tandem repeat (x2) | pSAC35 | 266 | 191 | 341 | 458 | 459 | Invertase |
| | | {b}1(x2)/HSA | fusion to the N-termal HSA. | | | | | | | |
| | | | Under the invertase signal | | | | | | | |
| | | | peptide. | | | | | | | |
| 76 | 3692 | pC4:MPIFSP.cynoBNP/ | Myeloid progenitor inhibitory | pC4 | 496 | 460 | 532 | 568 | 569 | MPIF-1 |
| | | CSA | factor-1 (MPIF-1) signal | (Mammalian) | | | | | | |
| | | | sequence followed by | | | | | | | |
| | | | cynomolgus monkey BNP fused | | | | | | | |
| | | | at the N-terminus of cynomolgus | | | | | | | |
| | | | monkey serum albumin. | | | | | | | |
| 77 | 3716 | pC4:ratBNP45/RSA | Pre-pro region of the HSA leader | pC4 | 497 | 461 | 533 | 570 | 571 | HSA |
| | | | sequence followed by rat BNP(1-45) | (Mammalian) | | | | | | |
| | | | fused at the N-terminus of rat | | | | | | | |
| | | | serum albumin. | | | | | | | |
| 78 | 3741 | pC4:MPIFSP.ratBNP | Myeloid progenitor inhibitory | pC4 | 498 | 462 | 534 | 572 | 573 | MPIF-1 |
| | | 45/RSA | factor-1 (MPIF-1) signal | (Mammalian) | | | | | | |
| | | | sequence followed by rat BNP(1-45) | | | | | | | |
| | | | fused at the N-terminus of rat | | | | | | | |
| | | | serum albumin. | | | | | | | |
| 79 | 3956 | pSAC35:BNP(K3-H32). | HSA/Kex2 signal sequence | pSAC35 | 499 | 463 | 535 | 574 | 575 | HSA/Kex2 |
| | | HSA | followed by BNP (amino acids 3-32) | | | | | | | |
| | | | fused at the N-terminus of | | | | | | | |
| | | | mature HSA. | | | | | | | |
| 80 | 3957 | pSAC35:BNP(K3-R30). | HSA/Kex2 signal sequence | pSAC35 | 500 | 464 | 536 | 576 | 577 | HSA/Kex2 |
| | | GGG.HSA | followed by BNP (amino acids 3-30) | | | | | | | |
| | | | fused via tripartite glycines to | | | | | | | |
| | | | the N-terminus of mature HSA. | | | | | | | |
| 81 | 3959 | pSAC35:HSA.BNP | HSA/Kex2 signal sequence | pSAC35 | 501 | 465 | 537 | 578 | 579 | HSA/Kex2 |
| | | (S1-L29) | followed by mature HSA fused to | | | | | | | |
| | | | BNP (amino acids 1-29) at its C- | | | | | | | |
| | | | terminus. | | | | | | | |
| 82 | 3960 | pSAC35:HSA.IFNalpha2a | HSA/Kex2 signal sequence | pSAC35 | 502 | 466 | 538 | 580 | 581 | HSA/Kex2 |
| | | | followed by mature HSA fused to | | | | | | | |
| | | | interferon alpha 2a at its C- | | | | | | | |
| | | | terminus. | | | | | | | |
| 83 | 3961 | pSAC35:HSA.(BNP | HSA/Kex2 signal sequence | pSAC35 | 503 | 467 | 539 | 582 | 583 | HSA/Kex2 |
| | | (S1-L29))x2 | followed by mature HSA fused to | | | | | | | |
| | | | two tandem copies of BNP | | | | | | | |
| | | | (amino acids 1-29) at its C- | | | | | | | |
| | | | terminus. | | | | | | | |
| 84 | 3962 | pcDNA3.1-:BNP(1-32). | Pre-pro region of the HSA signal | pCDNA3.1 | 504 | 468 | 540 | None | None | HSA |
| | | HSA | sequence followed by BNP | | | | | | | |
| | | | (amino acids 1-32) fused at the | | | | | | | |
| | | | N-terminus of mature HSA. | | | | | | | |
| 85 | 3965 | pSAC35:HSA.BNP | HSA/Kex2 signal sequence | pSAC35 | 505 | 469 | 541 | 584 | 585 | HSA/Kex-2 |
| | | (S1-R30) | followed by mature HSA fused to | | | | | | | |
| | | | BNP (amino acids 1-30) at its C- | | | | | | | |
| | | | terminus. | | | | | | | |
| 86 | 3966 | pSAC35:HSA.BNP | HSA/Kex2 signal sequence | pSAC35 | 506 | 470 | 542 | 586 | 587 | HSA/Kex-2 |
| | | (S1-R31) | followed by mature HSA fused to | | | | | | | |
| | | | BNP (amino acids 1-31) at its C- | | | | | | | |
| | | | terminus. | | | | | | | |
| 87 | 3967 | pSAC35:HSAsp.BNP | Pre region of the HSA signal | pSAC35 | 507 | 471 | 543 | None | None | HSA |
| | | (S1-H32).HSA | sequence followed BNP (amino | | | | | | | |
| | | | acids 1-32) fused to the N- | | | | | | | |
| | | | terminus of mature HSA. | | | | | | | |
| 88 | 3968 | pSAC35:INVsp.BNP | Invertase signal peptide followed | | 508 | 472 | 544 | 588 | 589 | Invertase |
| | | (S1-H32).HSA | by BNP (amino acids 1-32) fused | | | | | | | |
| | | | to the N-terminus of mature HSA. | | | | | | | |
| 89 | 3970 | pSAC35:INVsp.CKB1 | Invertase signal peptide followed | pSAC35 | 509 | 473 | 545 | 590 | 591 | Invertase |
| | | (T20-N93) | by mature mutant Ckbeta1 | | | | | | | |
| | | (E34A).HSA | (amino acids 20-93 (E34A)) | | | | | | | |
| | | | fused to the N-terminus of mature | | | | | | | |
| | | | HSA. | | | | | | | |
| 90 | 4005 | pSAC35:BNP(S1-R30). | HSA/Kex-2 signal sequence | pSAC35 | 510 | 474 | 546 | None | None | HSA/Kex-2 |
| | | HSA | followed by BNP (amino acids 1-30) | | | | | | | |
| | | | fused to the N-terminus of | | | | | | | |
| | | | mature HSA. | | | | | | | |
| 91 | 4006 | pSAC35:BNP(S1-R30). | HSA/Kex-2 signal sequence | pSAC35 | 511 | 475 | 547 | None | None | HSA/Kex-2 |
| | | HSA(D25-E40). | followed by BNP (amino acids 1-30) | | | | | | | |
| | | HSA | fused via a 16 amino acid | | | | | | | |
| | | | linker derived from HSA (amino | | | | | | | |
| | | | acids 25-40) to the N-terminus of | | | | | | | |
| | | | mature HSA. | | | | | | | |
| 92 | 4007 | pSAC35:BNP(S1-R30). | HSA/Kex-2 signal sequence | pSAC35 | 512 | 476 | 548 | None | None | HSA/Kex-2 |
| | | HSA(D25-Q56). | followed by BNP (amino acids 1-30) | | | | | | | |
| | | HSA | fused via a 32 amino acid | | | | | | | |
| | | | linker derived from HSA (amino | | | | | | | |
| | | | acids 25-56) to the N-terminus of | | | | | | | |
| | | | mature HSA. | | | | | | | |
| 93 | 4062 | pcDNA3.1:MPIFsp. | Myeloid progenitor inhibitory | pCDNA3.1- | 513 | 477 | 549 | None | None | MPIF-1 |
| | | HSA.BNP(S1-H32) | factor-1 (MPIF-1) signal | | | | | | | |
| | | | sequence followed by mature | | | | | | | |
| | | | HSA fused to BNP at its C- | | | | | | | |
| | | | terminus. | | | | | | | |
| 94 | 4130 | pSAC35:HSA | HSA/Kex-2 signal sequence | pSAC35 | 514 | 478 | 550 | None | None | HSA/Kex-2 |
| | | (C34S)-BNP (1-29) | followed by a mutant of mature | | | | | | | |
| | | | HSA (C34S) fused to BNP at its | | | | | | | |
| | | | C-terminus. | | | | | | | |
| 95 | 4160 | pSAC35:BNP(S1-R30: | HSA/Kex-2 followed by a mutant | pSAC35 | 515 | 479 | 551 | None | None | HSA/Kex-2 |
| | | P2A).HSA | BNP (amino acids 1-30 (P2A)) | | | | | | | |
| | | | fused to the N-terminus of mature | | | | | | | |
| | | | HSA. | | | | | | | |
| 96 | 4161 | pSAC35:BNP(S1-R30: | HSA/Kex-2 followed by a mutant | pSAC35 | 516 | 480 | 552 | None | None | HSA/Kex-2 |
| | | P2L).HSA | BNP (amino acids 1-30 (P2L)) | | | | | | | |
| | | | fused to the N-terminus of mature | | | | | | | |
| | | | HSA. | | | | | | | |
| 97 | 4167 | pSAC35:DSA.dogB | Modified HSA/Kex-2 signal | pSAC35 | 517 | 481 | 553 | None | None | Modified |
| | | NP(1-32) | sequence followed by dog serum | | | | | | | HSA/Kex-2 |
| | | | albumin fused to dog BNP | | | | | | | |
| | | | (amino acids 1-32) at its C- | | | | | | | |
| | | | terminus. | | | | | | | |
| 98 | 4168 | pSAC35:DSA.dogB | Modified HSA/Kex-2 signal | pSAC35 | 518 | 482 | 554 | None | None | Modified |
| | | NP(1-29) | sequence followed by dog serum | | | | | | | HSA/Kex-2 |
| | | | albumin fused to dog BNP | | | | | | | |
| | | | (amino acids 1-29) at its C- | | | | | | | |
| | | | terminus. | | | | | | | |
| 99 | 4169 | pSAC35:KTsp.CSA. | Killer toxin signal sequence | pSAC35 | 519 | 483 | 555 | None | None | Killer toxin |
| | | cynoBNP(1-29) | followed by cynomolgus monkey | | | | | | | |
| | | | serum fused to cyno BNP (1-29) | | | | | | | |
| | | | at its C-terminus. | | | | | | | |
| 100 | 4170 | pSAC35:KTsp.RSA.ratBNP | Killer toxin signal sequence | pSAC35 | 520 | 484 | 556 | None | None | Killer toxin |
| | | (1-45) | followed by rat serum albumin | | | | | | | |
| | | | fused to rat BNP (amino acids 1-45) | | | | | | | |
| | | | at its C-terminus. | | | | | | | |
| 101 | 4171 | pSAC35:KTsp.RSA.ratBNP | Killer toxin signal sequence | pSAC35 | 521 | 485 | 557 | None | None | Killer toxin |
| | | (14-42) | followed by rat serum albumin | | | | | | | |
| | | | fused to rat BNP (amino acids 14-42) | | | | | | | |
| | | | at its C-terminus. | | | | | | | |
| 102 | 4172 | pSAC35:MSA.mouse | Invertase signal sequence | pSAC35 | 522 | 486 | 558 | None | None | Invertase |
| | | BNP(1-45) | followed by mouse serum | | | | | | | |
| | | | albumin fused to mouse BNP | | | | | | | |
| | | | (amino acids 1-45) at its C- | | | | | | | |
| | | | terminus. | | | | | | | |
| 103 | 4173 | pc4HSA:HSA.2xBeta | Pre-pro region of the HSA signal | pC4 | 523 | 487 | 559 | 592 | 593 | HSA |
| | | Defensin-2 | sequence followed by mature | (Mammalian) | | | | | | |
| | | | HSA fused to two tandem copies | | | | | | | |
| | | | of Beta Defensin-2 at its C- | | | | | | | |
| | | | terminus. | | | | | | | |
| 104 | 4174 | pSAC35:ANP.HSA. | HSA/Kex-2 signal sequence | pSAC35 | 524 | 488 | 560 | 594 | 595 | HSA/Kex-2 |
| | | BNP(S1-L29) | followed by mature ANP fused to | | | | | | | |
| | | | the N-terminus of mature HSA | | | | | | | |
| | | | and BNP (amino acids 1-29) | | | | | | | |
| | | | fused to the C-terminus of mature | | | | | | | |
| | | | HSA. | | | | | | | |
| 105 | 4175 | pc4HSA:HSA.beta | Pre-pro region of the HSA signal | pC4 | 525 | 489 | 561 | 596 | 597 | HSA |
| | | Defensin-2 | sequence followed by mature | (Mammalian) | | | | | | |
| | | | HSA fused to beta Defensin-2 at | | | | | | | |
| | | | its C-terminus. | | | | | | | |
| 106 | 4176 | pc4HSA:HSASp.beta | Pre-pro region of the HSA signal | pC4 | 526 | 490 | 562 | 598 | 599 | HSA |
| | | Defensin-2.HSA | sequence followed by beta | (Mammalian) | | | | | | |
| | | | Defensin-2 fused to the N- | | | | | | | |
| | | | terminus of mature HSA. | | | | | | | |
| 107 | 4177 | pc4HSA:HSASp.2xbeta | Pre-pro region of the HSA signal | pC4 | 527 | 491 | 563 | 600 | 601 | HSA |
| | | Defensin-2.HSA | sequence followed by two tandem | (Mammalian) | | | | | | |
| | | | copies of beta Defensin-2 fused | | | | | | | |
| | | | to the N-terminus of mature HSA. | | | | | | | |
| 108 | 4178 | pSAC35:KEX2.2xbeta | HSA/Kex-2 signal sequence | pSAC35 | 528 | 492 | 564 | None | None | HSA/Kex-2 |
| | | Defensin-2.HSA | followed by two tandem copies of | | | | | | | |
| | | | beta Defensin-2 fused to the N- | | | | | | | |
| | | | terminus of mature HSA. | | | | | | | |
| 109 | 4179 | pSAC35:KEX2.beta | HSA/Kex-2 signal sequence | pSAC35 | 529 | 493 | 565 | None | None | HSA/Kex-2 |
| | | Defensin-2.HSA | followed by beta Defensin-2 | | | | | | | |
| | | | fused to the N-terminus of mature | | | | | | | |
| | | | HSA. | | | | | | | |
| 110 | 4180 | pSAC35:HSA.beta | HSA/Kex-2 signal sequence | pSAC35 | 530 | 494 | 566 | None | None | HSA/Kex-2 |
| | | Defensin-2 | followed by mature HSA fused to | | | | | | | |
| | | | beta defensin-2 at its C-terminus. | | | | | | | |
| 111 | 4181 | pSAC35:HSA.2x.beta | HSA/Kex-2 signal sequence | pSAC35 | 531 | 495 | 567 | None | None | HSA/Kex-2 |
| | | Defensin-2 | followed by mature HSA fused to | | | | | | | |
| | | | two tandem copies of beta | | | | | | | |
| | | | Defensin-2 at its C-terminus. | | | | | | | |
| 112 | 4191 | pSAC35:HSA.Fractalkine. | HSA/Kex-2 signal sequence | pSAC35 | 641 | 602 | 680 | None | None | HSA/Kex-2 |
| | | Q25-G100 | followed by mature HSA fused to | | | | | | | |
| | | | soluble fractalkine (amino acids | | | | | | | |
| | | | 25-100) at its C-terminus. | | | | | | | |
| 113 | 4192 | pSAC35:Fractalkine. | HSA/Kex-2 signal sequence | pSAC35 | 642 | 603 | 681 | None | None | HSA/Kex-2 |
| | | Q25-G100.HSA | followed by soluble fractalkine | | | | | | | |
| | | | (amino acids 25-100) fused to the | | | | | | | |
| | | | N-terminus of mature HSA. | | | | | | | |
| 114 | 4193 | pSAC35:Fractalkine. | HSA/Kex-2 signal sequence | pSAC35 | 643 | 604 | 682 | None | None | HSA/Kex-2 |
| | | Q25-G100 | followed by soluble mutant | | | | | | | |
| | | (R48Q).HSA | fractalkine (amino acids 25-100 | | | | | | | |
| | | | (R48Q, corresponding to R71Q | | | | | | | |
| | | | of full-length fractalkine)) fused | | | | | | | |
| | | | to the N-terminus of mature HSA. | | | | | | | |
| 115 | 4194 | pSAC35:Fractalkine. | HSA/Kex-2 signal sequence | pSAC35 | 644 | 605 | 683 | None | None | HSA/Kex-2 |
| | | V29-G100.HSA | followed by mature HSA fused to | | | | | | | |
| | | | a soluble dominant negative form | | | | | | | |
| | | | of fractalkine (amino acids 29-100) | | | | | | | |
| | | | at its C-terminus. | | | | | | | |
| 116 | 4213 | pSAC35:INVsp.OXM. | Invertase signal sequence | pSAC35 | 645 | 606 | 684 | None | None | Invertase |
| | | HSA | followed by full-length | | | | | | | |
| | | | oxyntomodulin fused to the N- | | | | | | | |
| | | | terminus of HSA. | | | | | | | |
| 117 | 4215 | pSAC35:INVsp.PYY | Invertase signal sequence | pSAC35 | 646 | 607 | 685 | 719 | 720 | Invertase |
| | | 3-36.HSA(D25-E40). | followed by PYY (amino acids 3-36) | | | | | | | |
| | | HSA.OXM | fused via a 16 amino acid | | | | | | | |
| | | | linker from HSA (amino acids | | | | | | | |
| | | | 25-40) to the N-terminus of | | | | | | | |
| | | | mature HSA which is fused at its | | | | | | | |
| | | | C-terminus to full-length | | | | | | | |
| | | | oxyntomodulin. | | | | | | | |
| 118 | 4217 | pC4:HSA.OXM | Pre-pro region of the HSA signal | pC4 | 647 | 608 | 686 | 721 | 722 | HSA |
| | | | sequence followed by mature | (Mammalian) | | | | | | |
| | | | HSA fused at its C-terminus to | | | | | | | |
| | | | full-length oxyntomodulin. | | | | | | | |
| 119 | 4227 | pSAC35:Invsp.KP.HSA | Invertase signal sequence | pSAC35 | 648 | 609 | 687 | None | None | Invertase |
| | | (D25-E40).HSA | followed by killer toxin peptide | | | | | | | |
| | | | fused via a 16 amino acid linker | | | | | | | |
| | | | from HSA (amino acids 25-40) to | | | | | | | |
| | | | mature HSA. | | | | | | | |
| 120 | 4232 | pCDNA3.1+: | Pre-pro region of the HSA signal | pCDNA3.1+ | 649 | 610 | 688 | None | None | HSA |
| | | HSA.OXM | sequence followed by mature | | | | | | | |
| | | | HSA fused at its C-terminus to | | | | | | | |
| | | | full length oxyntomodulin. | | | | | | | |
| 121 | 4233 | pSAC35:KEX2.TIMP4. | HSA/Kex-2 leader sequence | pSAC35 | 650 | 611 | 689 | 723 | 724 | HSA/Kex-2 |
| | | C30-G157.HSA | followed by a C-terminal | | | | | | | |
| | | | truncated form of mature TIMP4 | | | | | | | |
| | | | (amino acids 30-157) fused to the | | | | | | | |
| | | | N-terminus of mature HSA. | | | | | | | |
| 122 | 4234 | pSAC35:HSA.TIMP. | HSA/Kex-2 leader sequence | pSAC35 | 651 | 612 | 690 | 725 | 726 | HSA/Kex-2 |
| | | C30-G157 | followed by mature HSA fused at | | | | | | | |
| | | | its C-terminus to a C-terminal | | | | | | | |
| | | | truncated form of mature TIMP4 | | | | | | | |
| | | | (amino acids 30-157). | | | | | | | |
| 123 | 4235 | pC4:HSA.2x(PYY 3-36) | Pre-pro region of the HSA signal | pC4 | 652 | 613 | 691 | None | None | HSA |
| | | | sequence followed by mature | (Mammalian) | | | | | | |
| | | | HSA fused to two tandem copies | | | | | | | |
| | | | of PYY (amino acids 3-36) at its | | | | | | | |
| | | | C-terminus. | | | | | | | |
| 124 | 4236 | pC4: | A consensus signal sequence | pC4 | 653 | 614 | 692 | 727 | None | Consensus |
| | | SPCON2sp.PYY(3-36). | followed by PYY (amino acids 3-36) | (Mammalian) | | | | | | |
| | | HSA | fused to the N-terminus of | | | | | | | |
| | | | mature HSA. | | | | | | | |
| 125 | 4239 | pSAC35: | Modified HSA/Kex-2 leader | pSAC35 | 654 | 615 | 693 | None | None | Modified |
| | | [HSA/KEX(R19G)]sp. | sequence followed by | | | | | | | HSA/Kex |
| | | ADM.HSA | adrenomedullin fused to the N- | | | | | | | |
| | | | terminus of mature HSA. | | | | | | | |
| 126 | 4240 | pC4: | A consensus signal sequence | pC4 | 655 | 616 | 694 | None | None | Consensus |
| | | SPCON2sp.OXM.HSA | followed by oxynotmodulin fused | (Mammalian) | | | | | | |
| | | | to the N-terminus of mature HSA. | | | | | | | |
| 127 | 4241 | pC4:HSA.Ghrelin | Pre-pro region of the HSA signal | pC4 | 656 | 617 | 695 | 728 | 729 | HSA |
| | | | sequence followed by mature | (Mammalian) | | | | | | |
| | | | HSA fused to ghrelin at its C- | | | | | | | |
| | | | terminus | | | | | | | |
| 128 | 4242 | pSAC35: | Pre-pro region of the HSA signal | pSAC35 | 657 | 618 | 696 | 730 | 731 | HSA |
| | | HSA.Ghrelin | sequence followed by mature | | | | | | | |
| | | | HSA fused to ghrelin at its C- | | | | | | | |
| | | | terminus | | | | | | | |
| 129 | 4246 | pSAC35:CGRP(V8-F37). | HSA/Kex-2 signal sequence | pSAC35 | 658 | 619 | 697 | None | None | HSA/Kex-2 |
| | | HSA | followed by a truncated form of | | | | | | | |
| | | | CGRP (amino acids 8-37) fused | | | | | | | |
| | | | to the N-terminus of mature HSA. | | | | | | | |
| 130 | 4247 | pSAC35:HSA.CGRP | HSA/Kex-2 signal sequence | pSAC35 | 659 | 620 | 698 | None | None | HSA/Kex-2 |
| | | (V8-F37) | followed by mature HSA fused to | | | | | | | |
| | | | a truncated form of CGRP (amino | | | | | | | |
| | | | acids 8-37) at its C-terminus. | | | | | | | |
| 131 | 4248 | pSAC35:CGRP(L12-F37). | HSA/Kex-2 signal sequence | pSAC35 | 660 | 621 | 699 | None | None | HSA/Kex-2 |
| | | HSA | followed by a truncated form of | | | | | | | |
| | | | CGRP (amino acids 12-37) fused | | | | | | | |
| | | | to the N-terminus of mature HSA. | | | | | | | |
| 132 | 4249 | pSAC35:HSA.CGRP | HSA/Kex-2 signal sequence | pSAC35 | 661 | 622 | 700 | None | None | HSA/Kex-2 |
| | | (L12-F37) | followed by a mature HSA fused | | | | | | | |
| | | | to a truncated form of CGRP | | | | | | | |
| | | | (amino acids 12-37) at its C- | | | | | | | |
| | | | terminus. | | | | | | | |
| 133 | 4251 | pSAC35:HSA.IGF1 | HSA/Kex-2 signal sequence | pSAC35 | 662 | 623 | 701 | None | None | HSA/Kex-2 |
| | | (G49-M153) | followed by mature HSA fused to | | | | | | | |
| | | | a mature form of IGF1 (amino | | | | | | | |
| | | | acids 49-153) at its C-terminus. | | | | | | | |
| 134 | 4252 | pSAC35:IGF1(G49-M153). | HSA/Kex-2 signal sequence | pSAC35 | 663 | 624 | 702 | None | None | HSA/Kex-2 |
| | | HSA | followed by a mature form of | | | | | | | |
| | | | IGF1 (amino acids 49-153) fused | | | | | | | |
| | | | to the N-terminus of mature HSA. | | | | | | | |
| 135 | 4253 | pC4:SPCON2.OXM. | A consensus signal sequence | pC4 | 664 | 625 | 703 | None | None | Consensus |
| | | OXM.HSA | followed by two tandem copies of | (Mammalian) | | | | | | |
| | | | oxyntomodulin fused to the N- | | | | | | | |
| | | | terminus of mature HSA. | | | | | | | |
| 136 | 4254 | pSAC35:NA(S35-K469). | HSA/Kex-2 signal sequence | pSAC35 | 665 | 626 | 704 | None | None | HSA/Kex-2 |
| | | HSA | followed an N-terminally | | | | | | | |
| | | | truncated form of neuraminidase | | | | | | | |
| | | | from Influenza A/Hong | | | | | | | |
| | | | Kong/213/03 (HK213; H5N1) | | | | | | | |
| | | | (amino acids 35-469) fused via a | | | | | | | |
| | | | Gly-Ser linker | | | | | | | |
| | | | (GGGGSGGGGSGG) to the N- | | | | | | | |
| | | | terminus of mature HSA. | | | | | | | |
| 137 | 4255 | pC4.SPCON2:NA(S35-K469). | A consensus signal sequence | pC4 | 666 | 627 | 705 | None | None | Consensus |
| | | HSA | followed by an N-terminally | (Mammalian) | | | | | | |
| | | | truncated form of neuraminidase | | | | | | | |
| | | | from Influenza A/Hong | | | | | | | |
| | | | Kong/213/03 (HK213; H5N1) | | | | | | | |
| | | | (amino acids 35-469) fused via a | | | | | | | |
| | | | Gly-Ser | | | | | | | |
| | | | linker(GGGGSGGGGSGG) to | | | | | | | |
| | | | the N-terminus of mature HSA. | | | | | | | |
| 138 | 4256 | pSAC35:HA(D17-Q531). | HSA/Kex-2 signal sequence | pSAC35 | 667 | 628 | 706 | None | None | HSA/Kex-2 |
| | | HSA | followed by a truncated form of | | | | | | | |
| | | | hemagglutinin from Influenza | | | | | | | |
| | | | A/Hong Kong/213/03 | | | | | | | |
| | | | (HK213; H5N1) (amino acids 17-531) | | | | | | | |
| | | | lacking a signal peptide and | | | | | | | |
| | | | the C-terminal hydrophobic | | | | | | | |
| | | | domain, fused via a Gly-Ser | | | | | | | |
| | | | linker (GGGGSGGGGSGG) to | | | | | | | |
| | | | the N-terminus of mature HSA. | | | | | | | |
| 139 | 4257 | pC4:SPCON2.HA(D17-Q531). | A consensus signal sequence | pC4 | 668 | 629 | 707 | None | None | Consensus |
| | | HSA | followed by a truncated form of | (Mammalian) | | | | | | |
| | | | hemagglutinin from Influenza | | | | | | | |
| | | | A/Hong Kong/213/03 | | | | | | | |
| | | | (HK213; H5N1) (amino acids 17-531) | | | | | | | |
| | | | lacking a signal peptide and | | | | | | | |
| | | | the C-terminal hydrophobic | | | | | | | |
| | | | domain, fused via a Gly-Ser | | | | | | | |
| | | | linker (GGGGSGGGGSGG) to | | | | | | | |
| | | | the N-terminus of mature HSA. | | | | | | | |
| 140 | 4258 | pSAC35.BChE(E29-V557). | HSA/Kex-2 signal sequence | pSAC35 | 669 | 630 | 708 | None | None | HSA/Kex-2 |
| | | HSA | followed by butyrylcholinesterase | | | | | | | |
| | | | (BChE) (amino acids 39-529 | | | | | | | |
| | | | (A356W, Y360A, N45Q, N483Q, | | | | | | | |
| | | | N509Q and N514Q)) fused to the | | | | | | | |
| | | | N-terminus of mature HSA. | | | | | | | |
| 141 | 4259 | pC4:SPCON2.BChE | A consensus signal sequence | pC4 | 670 | 631 | 709 | None | None | Consensus |
| | | (E29-V557).HSA | followed by butyrylcholinesterase | (Mammalian) | | | | | | |
| | | | (BChE) (amino acids 39-529 | | | | | | | |
| | | | (A356W, Y360A, N45Q, N483Q, | | | | | | | |
| | | | N509Q and N514Q)) fused to the | | | | | | | |
| | | | N-terminus of mature HSA. | | | | | | | |
| 142 | 4260 | pC4:HSA.ADM (Y1-G53) | Pre-pro region of the HSA signal | pC4 | 671 | 632 | 710 | None | None | HSA |
| | | | sequence followed by mature | (Mammalian) | | | | | | |
| | | | HSA fused at its C-terminus to | | | | | | | |
| | | | adrenomedullin containing an | | | | | | | |
| | | | additional glycine residue at the | | | | | | | |
| | | | C-terminus (amino acids 1-53). | | | | | | | |
| 143 | 4261 | pSAC35:HSA.ADM | HSA/Kex-2 signal sequence | pSAC35 | 672 | 633 | 711 | None | None | HSA/Kex-2 |
| | | (Y1-G53) | followed by mature HSA fused at | | | | | | | |
| | | | its C-terminus to adrenomedullin | | | | | | | |
| | | | containing an additional glycine | | | | | | | |
| | | | residue at the C-terminus (amino | | | | | | | |
| | | | acids 1-53). | | | | | | | |
| 144 | 4262 | pC4:HSA.PYY(I3-G37) | Pre-pro region of the HSA signal | pC4 | 673 | 634 | 712 | None | None | HSA |
| | | | sequence followed by mature | (Mammalian) | | | | | | |
| | | | HSA fused at its C-terminus to | | | | | | | |
| | | | PYY containing an additional | | | | | | | |
| | | | glycine residue at the C-terminus | | | | | | | |
| | | | (amino acids 3-37). | | | | | | | |
| 145 | 4267 | pSAC35:HSA.PYY(I3-G37) | HSA/Kex-2 signal sequence | pSAC35 | 674 | 635 | 713 | None | None | HSA/Kex-2 |
| | | | followed by mature HSA fused at | | | | | | | |
| | | | its C-terminus to PYY containing | | | | | | | |
| | | | an additional glycine residue at | | | | | | | |
| | | | the C-terminus (amino acids 3-37). | | | | | | | |
| 146 | 4290 | pSAC35:HSA(C34S). | HSA/Kex-2 signal sequence | pSAC35 | 675 | 636 | 714 | None | None | HSA/Kex-2 |
| | | INFa | followed by a mutant mature | | | | | | | |
| | | | HSA (C34S of mature HSA) | | | | | | | |
| | | | fused to mature interferon alpha | | | | | | | |
| | | | at its C-terminus. | | | | | | | |
| 147 | 4291 | pSAC35.HSA.INFa | HSA/Kex-2 signal sequence | pSAC35 | 676 | 637 | 715 | None | None | HSA/Kex-2 |
| | | (C586S) | followed by mature HSA fused to | | | | | | | |
| | | | a mutant mature interferon alpha | | | | | | | |
| | | | (C1S of mature IFNa) at its C- | | | | | | | |
| | | | terminus. | | | | | | | |
| 148 | 4292 | pSAC35:HSA.INFa | HSA/Kex-2 signal sequence | pSAC35 | 677 | 638 | 716 | None | None | HSA/Kex-2 |
| | | (C614S) | followed by mature HSA fused to | | | | | | | |
| | | | a mutant mature interferon alpha | | | | | | | |
| | | | (C29S of mature IFNa) at its C- | | | | | | | |
| | | | terminus. | | | | | | | |
| 149 | 4295 | pSAC35:HSA.INFa | HSA/Kex-2 signal sequence | pSAC35 | 678 | 639 | 717 | None | None | HSA/Kex-2 |
| | | (C683S) | followed by mature HSA fused to | | | | | | | |
| | | | a mutant mature interferon alpha | | | | | | | |
| | | | (C98S of mature IFNa) at its C- | | | | | | | |
| | | | terminus. | | | | | | | |
| 150 | 4296 | pSAC35:HSA.INFa | HSA/Kex-2 signal sequence | pSAC35 | 679 | 640 | 718 | None | None | HSA/Kex-2 |
| | | (C723S) | followed by mature HSA fused to | | | | | | | |
| | | | a mutant mature interferon alpha | | | | | | | |
| | | | (C138S of mature IFNa) at its C- | | | | | | | |
| | | | terminus. | | | | | | | |
| 151 | 3108 | pSAC35HSA.PYY | Mature PYY fused downstream | pSAC35 | 744 | 732 | 756 | None | None | HSA/kex2 |
| | | | of mature HSA and the | | | | | | | |
| | | | HSA/kex2 leader. | | | | | | | |
| 152 | 3109 | pSAC35HSA.PYY3-36 | HSA/kex2 leader followed by | pSAC35 | 745 | 733 | 757 | None | None | HSA/kex2 |
| | | | mature HSA and then PYY3-36 | | | | | | | |
| | | | (SEQ ID NO: 1799). | | | | | | | |
| 153 | 3117 | pC4:PYY3-36/HSA | HSA leader followed by PYY3-36 | pC4 | 746 | 734 | 758 | 768 | 769 | HSA |
| | | | (SEQ ID NO: 1800) and | | | | | | | |
| | | | mature HSA. | | | | | | | |
| 154 | 3118 | pSAC35:PYY3-36/ | HSA/kex2 leader followed by | pSAC35 | 747 | 735 | 759 | 770 | 771 | HSA/kex2 |
| | | HSA | PYY3-36 (SEQ ID NO: 1801) and | | | | | | | |
| | | | mature HSA. | | | | | | | |
| 155 | 3281 | pSAC35.PY3-36 | PYY3-36 tandem repeat (x2) | pSAC35 | 748 | 736 | 760 | 772 | 773 | HSA/kex2 |
| | | (x2)/HSA | fused upstream of HSA and | | | | | | | |
| | | | downstream of the HSA/kex2 | | | | | | | |
| | | | signal peptide. | | | | | | | |
| 156 | 3282 | pSAC35:HSA/PYY3-36 | PYY3-36 tandem repeat (x2) | pSAC35 | 749 | 737 | 761 | 774 | 775 | HSA/kex2 |
| | | (x2) | fused downstream of mature HSA | | | | | | | |
| | | | and HSA/kex2 leader. | | | | | | | |
| 157 | 3144 | pSAC35:adrenomedullin | HSA/kex2 leader followed by | pSAC35 | 750 | 738 | 762 | 776 | 777 | HSA/kex2 |
| | | (27-52)/HSA | amino acids 27-52 of | | | | | | | |
| | | | adrenomedullin followed by | | | | | | | |
| | | | mature HSA. | | | | | | | |
| 158 | 3579 | pSAC35:HSA/kex2. | HSA/kex2 leader followed by | pSAC35 | 751 | 739 | 763 | None | None | HSA/kex2 |
| | | HSA.oxyntomodulin | mature HSA followed by mature | | | | | | | |
| | | | oxyntomodulin. | | | | | | | |
| 159 | 3580 | pSAC35:HSA/kex2.oxyntomodulin. | HSA/kex2 leader followed by | pSAC35 | 752 | 740 | 764 | None | None | HSA/kex2 |
| | | HSA | mature oxyntomodulin followed | | | | | | | |
| | | | by mature HSA. | | | | | | | |
| 160 | 4268 | pC4: | Consensus signal sequence | pC4 | 753 | 741 | 765 | 778 | 779 | Consensus |
| | | SPCON2sp.Ghrelin. | followed by ghrelin fused to the | (Mammalian) | | | | | | |
| | | HSA | N-terminus of HSA. | | | | | | | |
| 161 | 4273 | pSAC35:KEX2.TIMP4. | HSA/Kex-2 signal sequence | pSAC35 | 754 | 742 | 766 | None | None | HSA/Kex-2 |
| | | C30-P224.HSA | followed by mature TIMP4 | | | | | | | |
| | | | (amino acids 30-224) fused to the | | | | | | | |
| | | | N-terminus of mature HSA. | | | | | | | |
| 162 | 4274 | pSAC35:HSA.TIMP4. | HSA/Kex-2 signal sequence | pSAC35 | 755 | 743 | 767 | None | None | HSA/Kex-2 |
| | | C30-P224 | followed by mature HSA fused to | | | | | | | |
| | | | mature TIMP4 (amino acids 30-224) | | | | | | | |
| | | | at its C-terminus. | | | | | | | |

[0081] Table 2 provides a non-exhaustive list of polynucleotides of the invention comprising, or alternatively consisting of, nucleic acid molecules encoding an albumin fusion protein. The first column, “Fusion No.” gives a fusion number to each polynucleotide. Column 2, “Construct ID” provides a unique numerical identifier for each polynucleotide of the invention. The Construct IDs may be used to identify polynucleotides which encode albumin fusion proteins comprising, or alternatively consisting of, a Therapeutic protein portion corresponding to a given Therapeutic Protein:X listed in the corresponding row of Table 1 wherein that Construct ID is listed in column 5. The “Construct Name” column (column 3) provides the name of a given albumin fusion construct or polynucleotide.

[0082] The fourth column in Table 2, “Description” provides a general description of a given albumin fusion construct, and the fifth column, “Expression Vector” lists the vector into which a polynucleotide comprising, or alternatively consisting of, a nucleic acid molecule encoding a given albumin fusion protein was cloned. Vectors are known in the art, and are available commercially or described elsewhere. For example, as described in the Examples, an “expression cassette” comprising, or alternatively consisting of, one or more of (1) a polynucleotide encoding a given albumin fusion protein, (2) a leader sequence, (3) a promoter region, and (4) a transcriptional terminator, may be assembled in a convenient cloning vector and subsequently be moved into an alternative vector, such as, for example, an expression vector including, for example, a yeast expression vector or a mammalian expression vector. In one embodiment, for expression in S. cervisiae, an expression cassette comprising, or alternatively consisting of, a nucleic acid molecule encoding an albumin fusion protein is cloned into pSAC35. In another embodiment, for expression in CHO cells, an expression cassette comprising, or alternatively consisting of, a nucleic acid molecule encoding an albumin fusion protein is cloned into pC4. In a further embodiment, a polynucleotide comprising or alternatively consisting of a nucleic acid molecule encoding the Therapeutic protein portion of an albumin fusion protein is cloned into pC4:HSA. In a still further embodiment, for expression in NS0 cells, an expression cassette comprising, or alternatively consisting of, a nucleic acid molecule encoding an albumin fusion protein is cloned into pEE12. Other useful cloning and/or expression vectors will be known to the skilled artisan and are within the scope of the invention.

[0083] Column 6, “SEQ ID NO:Y,” provides the full length amino acid sequence of the albumin fusion protein of the invention. In most instances, SEQ ID NO:Y shows the unprocessed form of the albumin fusion protein encoded—in other words, SEQ ID NO:Y shows the signal sequence, a HSA portion, and a therapeutic portion all encoded by the particular construct. Specifically contemplated by the present invention are all polynucleotides that encode SEQ ID NO:Y. When these polynucleotides are used to express the encoded protein from a cell, the cell's natural secretion and processing steps produces a protein that lacks the signal sequence listed in columns 4 and/or 11 of Table 2. The specific amino acid sequence of the listed signal sequence is shown later in the specification or is well known in the art. Thus, most preferred embodiments of the present invention include the albumin fusion protein produced by a cell (which would lack the leader sequence shown in columns 4 and/or 11 of Table 2). Also most preferred are polypeptides comprising SEQ ID NO:Y without the specific leader sequence listed in columns 4 and/or 11 of Table 2. Compositions comprising these two preferred embodiments, including pharmaceutical compositions, are also preferred. Moreover, it is well within the ability of the skilled artisan to replace the signal sequence listed in columns 4 and/or 11 of Table 2 with a different signal sequence, such as those described later in the specification to facilitate secretion of the processed albumin fusion protein.

[0084] The seventh column, “SEQ ID NO:X,” provides the parent nucleic acid sequence from which a polynucleotide encoding a Therapeutic protein portion of a given albumin fusion protein may be derived. In one embodiment, the parent nucleic acid sequence from which a polynucleotide encoding a Therapeutic protein portion of an albumin fusion protein may be derived comprises the wild type gene sequence encoding a Therapeutic protein shown in Table 1. In an alternative embodiment, the parent nucleic acid sequence from which a polynucleotide encoding a Therapeutic protein portion of an albumin fusion protein may be derived comprises a variant or derivative of a wild type gene sequence encoding a Therapeutic protein shown in Table 1, such as, for example, a synthetic codon optimized variant of a wild type gene sequence encoding a Therapeutic protein.

[0085] The eighth column, “SEQ ID NO:Z,” provides a predicted translation of the parent nucleic acid sequence (SEQ ID NO:X). This parent sequence can be a full length parent protein used to derive the particular construct, the mature portion of a parent protein, a variant or fragment of a wildtype protein, or an artificial sequence that can be used to create the described construct. One of skill in the art can use this amino acid sequence shown in SEQ ID NO:Z to determine which amino acid residues of an albumin fusion protein encoded by a given construct are provided by the therapeutic protein. Moreover, it is well within the ability of the skilled artisan to use the sequence shown as SEQ ID NO:Z to derive the construct described in the same row. For example, if SEQ ID NO:Z corresponds to a full length protein, but only a portion of that protein is used to generate the specific CID, it is within the skill of the art to rely on molecular biology techniques, such as PCR, to amplify the specific fragment and clone it into the appropriate vector.

[0086] Amplification primers provided in columns 9 and 10, “SEQ ID NO:A” and “SEQ ID NO:B” respectively, are exemplary primers used to generate a polynucleotide comprising or alternatively consisting of a nucleic acid molecule encoding the Therapeutic protein portion of a given albumin fusion protein. In one embodiment of the invention, oligonucleotide primers having the sequences shown in columns 9 and/or 10 (SEQ ID NOS:A and/or B) are used to PCR amplify a polynucleotide encoding the Therapeutic protein portion of an albumin fusion protein using a nucleic acid molecule comprising or alternatively consisting of the nucleotide sequence provided in column 7 (SEQ ID NO:X) of the corresponding row as the template DNA. PCR methods are well-established in the art. Additional useful primer sequences could readily be envisioned and utilized by those of ordinary skill in the art.

[0087] In an alternative embodiment, oligonucleotide primers may be used in overlapping PCR reactions to generate mutations within a template DNA sequence. PCR methods are known in the art.

[0088] As shown in Table 3, certain albumin fusion constructs disclosed in this application have been deposited with the ATCC®.

TABLE 3

| | | ATCC Deposit No./ |
|---|---|---|
| Construct ID | Construct Name | Date |
| 2249 | pSAC35:IFNa2-HSA | PTA-3763 |
| | also named pSAC23:IFNα2-HSA | Oct. 4, 2001 |
| 2343 | pSAC35.INV-IFNA2.HSA | PTA-3940 |
| | | Dec. 19, 2001 |
| 2381 | pC4:HSA-IFNa2(C17-E181) | PTA-3942 |
| | | Dec. 19, 2001 |
| 2382 | pC4:IFNa2-HSA | PTA-3939 |
| | | Dec. 19, 2001 |
| 3165 | pSAC35:HSA.IFNa | PTA-4670 |
| | also named CID 3165, | Sep. 16, 2002 |
| | pSAC35:HSA.INFα | |

[0089] It is possible to retrieve a given albumin fusion construct from the deposit by techniques known in the art and described elsewhere herein (see, Example 10). The ATCC is located at 10801 University Boulevard, Manassas, Va. 20110-2209, USA. The ATCC deposits were made pursuant to the terms of the Budapest Treaty on the international recognition of the deposit of microorganisms for the purposes of patent procedure.

[0090] In a further embodiment of the invention, an “expression cassette” comprising, or alternatively consisting of one or more of (1) a polynucleotide encoding a given albumin fusion protein, (2) a leader sequence, (3) a promoter region, and (4) a transcriptional terminator can be moved or “subcloned” from one vector into another. Fragments to be subcloned may be generated by methods well known in the art, such as, for example, PCR amplification (e.g., using oligonucleotide primers having the sequence shown in SEQ ID NO:A or B), and/or restriction enzyme digestion.

[0091] In preferred embodiments, the albumin fusion proteins of the invention are capable of a therapeutic activity and/or biologic activity corresponding to the therapeutic activity and/or biologic activity of the Therapeutic protein corresponding to the Therapeutic protein portion of the albumin fusion protein listed in the corresponding row of Table 1. In further preferred embodiments, the therapeutically active protein portions of the albumin fusion proteins of the invention are fragments or variants of the protein encoded by the sequence shown in SEQ ID NO:X column of Table 2, and are capable of the therapeutic activity and/or biologic activity of the corresponding Therapeutic protein.

[0092] Polypeptide and Polynucleotide Fragments and Variants

[0093] Fragments

[0094] The present invention is further directed to fragments of the Therapeutic proteins described in Table 1, albumin proteins, and/or albumin fusion proteins of the invention.

[0095] The present invention is also directed to polynucleotides encoding fragments of the Therapeutic proteins described in Table 1, albumin proteins, and/or albumin fusion proteins of the invention.

[0096] Even if deletion of one or more amino acids from the N-terminus of a protein results in modification or loss of one or more biological functions of the Therapeutic protein, albumin protein, and/or albumin fusion protein of the invention, other Therapeutic activities and/or functional activities (e.g., biological activities, ability to multimerize, ability to bind a ligand) may still be retained. For example, the ability of polypeptides with N-terminal deletions to induce and/or bind to antibodies which recognize the complete or mature forms of the polypeptides generally will be retained when less than the majority of the residues of the complete polypeptide are removed from the N-terminus. Whether a particular polypeptide lacking N-terminal residues of a complete polypeptide retains such immunologic activities can readily be determined by routine methods described herein and otherwise known in the art. It is not unlikely that a mutein with a large number of deleted N-terminal amino acid residues may retain some biological or immunogenic activities. In fact, peptides composed of as few as six amino acid residues may often evoke an immune response.

[0097] Accordingly, fragments of a Therapeutic protein corresponding to a Therapeutic protein portion of an albumin fusion protein of the invention, include the full length protein as well as polypeptides having one or more residues deleted from the amino terminus of the amino acid sequence of the reference polypeptide (i.e., a Therapeutic protein referred to in Table 1, or a Therapeutic protein portion of an albumin fusion protein encoded by a polynucleotide or albumin fusion construct described in Table 2). In particular, N-terminal deletions may be described by the general formula m to q, where q is a whole integer representing the total number of amino acid residues in a reference polypeptide (e.g., a Therapeutic protein referred to in Table 1, or a Therapeutic protein portion of an albumin fusion protein of the invention, or a Therapeutic protein portion of an albumin fusion protein encoded by a polynucleotide or albumin fusion construct described in Table 2), and m is defined as any integer ranging from 2 to q minus 6. Polynucleotides encoding these polypeptides are also encompassed by the invention.

[0098] In addition, fragments of serum albumin polypeptides corresponding to an albumin protein portion of an albumin fusion protein of the invention, include the full length protein as well as polypeptides having one or more residues deleted from the amino terminus of the amino acid sequence of the reference polypeptide (i.e., serum albumin, or a serum albumin portion of an albumin fusion protein encoded by a polynucleotide or albumin fusion construct described in Table 2). In preferred embodiments, N-terminal deletions may be described by the general formula m to 585, where 585 is a whole integer representing the total number of amino acid residues in mature human serum albumin (SEQ ID NO:1), and m is defined as any integer ranging from 2 to 579. Polynucleotides encoding these polypeptides are also encompassed by the invention. In additional embodiments, N-terminal deletions may be described by the general formula m to 609, where 609 is a whole integer representing the total number of amino acid residues in full length human serum albumin (SEQ ID NO:3), and m is defined as any integer ranging from 2 to 603. Polynucleotides encoding these polypeptides are also encompassed by the invention.

[0099] Moreover, fragments of albumin fusion proteins of the invention, include the full length albumin fusion protein as well as polypeptides having one or more residues deleted from the amino terminus of the albumin fusion protein (e.g., an albumin fusion protein encoded by a polynucleotide or albumin fusion construct described in Table 2; or an albumin fusion protein having the amino acid sequence disclosed in column 6 of Table 2). In particular, N-terminal deletions may be described by the general formula m to q, where q is a whole integer representing the total number of amino acid residues in the albumin fusion protein, and m is defined as any integer ranging from 2 to q minus 6. Polynucleotides encoding these polypeptides are also encompassed by the invention.

[0100] Also as mentioned above, even if deletion of one or more amino acids from the N-terminus or C-terminus of a reference polypeptide (e.g., a Therapeutic protein; serum albumin protein; or albumin fusion protein of the invention) results in modification or loss of one or more biological functions of the protein, other functional activities (e.g., biological activities, ability to multimerize, ability to bind a ligand) and/or Therapeutic activities may still be retained. For example the ability of polypeptides with C-terminal deletions to induce and/or bind to antibodies which recognize the complete or mature forms of the polypeptide generally will be retained when less than the majority of the residues of the complete or mature polypeptide are removed from the C-terminus. Whether a particular polypeptide lacking the N-terminal and/or C-terminal residues of a reference polypeptide retains Therapeutic activity can readily be determined by routine methods described herein and/or otherwise known in the art.

[0101] The present invention further provides polypeptides having one or more residues deleted from the carboxy terminus of the amino acid sequence of a Therapeutic protein corresponding to a Therapeutic protein portion of an albumin fusion protein of the invention (e.g., a Therapeutic protein referred to in Table 1, or a Therapeutic protein portion of an albumin fusion protein encoded by a polynucleotide or albumin fusion construct described in Table 2). In particular, C-terminal deletions may be described by the general formula 1 to n, where n is any whole integer ranging from 6 to q minus 1, and where q is a whole integer representing the total number of amino acid residues in a reference polypeptide (e.g., a Therapeutic protein referred to in Table 1, or a Therapeutic protein portion of an albumin fusion protein encoded by a polynucleotide or albumin fusion construct described in Table 2). Polynucleotides encoding these polypeptides are also encompassed by the invention.

[0102] In addition, the present invention provides polypeptides having one or more residues deleted from the carboxy terminus of the amino acid sequence of an albumin protein corresponding to an albumin protein portion of an albumin fusion protein of the invention (e.g., serum albumin or an albumin protein portion of an albumin fusion protein encoded by a polynucleotide or albumin fusion construct described in Table 2). In particular, C-terminal deletions may be described by the general formula I to n, where n is any whole integer ranging from 6 to 584, where 584 is the whole integer representing the total number of amino acid residues in mature human serum albumin (SEQ ID NO:1) minus 1. Polynucleotides encoding these polypeptides are also encompassed by the invention. In particular, C-terminal deletions may be described by the general formula I to n, where n is any whole integer ranging from 6 to 608, where 608 is the whole integer representing the total number of amino acid residues in serum albumin (SEQ ID NO:3) minus 1. Polynucleotides encoding these polypeptides are also encompassed by the invention.

[0103] Moreover, the present invention provides polypeptides having one or more residues deleted from the carboxy terminus of an albumin fusion protein of the invention. In particular, C-terminal deletions may be described by the general formula I to n, where n is any whole integer ranging from 6 to q minus 1, and where q is a whole integer representing the total number of amino acid residues in an albumin fusion protein of the invention. Polynucleotides encoding these polypeptides are also encompassed by the invention.

[0104] In addition, any of the above described N- or C-terminal deletions can be combined to produce a N- and C-terminal deleted reference polypeptide. The invention also provides polypeptides having one or more amino acids deleted from both the amino and the carboxyl termini, which may be described generally as having residues m to n of a reference polypeptide (e.g., a Therapeutic protein referred to in Table 1, or a Therapeutic protein portion of an albumin fusion protein of the invention, or a Therapeutic protein portion encoded by a polynucleotide or albumin fusion construct described in Table 2, or serum albumin (e.g., SEQ ID NO:1), or an albumin protein portion of an albumin fusion protein of the invention, or an albumin protein portion encoded by a polynucleotide or albumin fusion construct described in Table 2, or an albumin fusion protein, or an albumin fusion protein encoded by a polynucleotide or albumin fusion construct of the invention) where n and m are integers as described above. Polynucleotides encoding these polypeptides are also encompassed by the invention.

[0105] The present application is also directed to proteins containing polypeptides at least 80%, 85%, 90%, 95%, 96%, 97%, 98% or 99% identical to a reference polypeptide sequence (e.g., a Therapeutic protein referred to in Table 1, or a Therapeutic protein portion of an albumin fusion protein of the invention, or a Therapeutic protein portion encoded by a polynucleotide or albumin fusion construct described in Table 2, or serum albumin (e.g., SEQ ID NO:1), or an albumin protein portion of an albumin fusion protein of the invention, or an albumin protein portion encoded by a polynucleotide or albumin fusion construct described in Table 2, or an albumin fusion protein, or an albumin fusion protein encoded by a polynucleotide or albumin fusion construct of the invention) set forth herein, or fragments thereof. In preferred embodiments, the application is directed to proteins comprising polypeptides at least 80%, 85%, 90%, 95%, 96%, 97%, 98% or 99% identical to reference polypeptides having the amino acid sequence of N- and C-terminal deletions as described above. Polynucleotides encoding these polypeptides are also encompassed by the invention.

[0106] Preferred polypeptide fragments of the invention are fragments comprising, or alternatively, consisting of, an amino acid sequence that displays a Therapeutic activity and/or functional activity (e.g. biological activity) of the polypeptide sequence of the Therapeutic protein or serum albumin protein of which the amino acid sequence is a fragment.

[0107] Other preferred polypeptide fragments are biologically active fragments. Biologically active fragments are those exhibiting activity similar, but not necessarily identical, to an activity of the polypeptide of the present invention. The biological activity of the fragments may include an improved desired activity, or a decreased undesirable activity.

[0108] Variants

[0109] “Variant” refers to a polynucleotide or nucleic acid differing from a reference nucleic acid or polypeptide, but retaining essential properties thereof. Generally, variants are overall closely similar, and, in many regions, identical to the reference nucleic acid or polypeptide.

[0110] As used herein, “variant”, refers to a Therapeutic protein portion of an albumin fusion protein of the invention, albumin portion of an albumin fusion protein of the invention, or albumin fusion protein of the invention differing in sequence from a Therapeutic protein (e.g. see “therapeutic” column of Table 1), albumin protein, and/or albumin fusion protein, respectively, but retaining at least one functional and/or therapeutic property thereof as described elsewhere herein or otherwise known in the art. Generally, variants are overall very similar, and, in many regions, identical to the amino acid sequence of the Therapeutic protein corresponding to a Therapeutic protein portion of an albumin fusion protein, albumin protein corresponding to an albumin protein portion of an albumin fusion protein, and/or albumin fusion protein. Nucleic acids encoding these variants are also encompassed by the invention.

[0111] The present invention is also directed to proteins which comprise, or alternatively consist of, an amino acid sequence which is at least 80%, 85%, 90%, 95%, 96%, 97%, 98%, 99% or 100%, identical to, for example, the amino acid sequence of a Therapeutic protein corresponding to a Therapeutic protein portion of an albumin fusion protein of the invention (e.g., the amino acid sequence of a Therapeutic protein:X disclosed in Table 1; or the amino acid sequence of a Therapeutic protein portion of an albumin fusion protein encoded by a polynucleotide or albumin fusion construct described in Table 1 and 2, or fragments or variants thereof), albumin proteins corresponding to an albumin protein portion of an albumin fusion protein of the invention (e.g., the amino acid sequence of an albumin protein portion of an albumin fusion protein encoded by a polynucleotide or albumin fusion construct described in Table 1 and 2; the amino acid sequence shown in SEQ ID NO:1; or fragments or variants thereof), and/or albumin fusion proteins. Fragments of these polypeptides are also provided (e.g., those fragments described herein). Further polypeptides encompassed by the invention are polypeptides encoded by polynucleotides which hybridize to the complement of a nucleic acid molecule encoding an albumin fusion protein of the invention under stringent hybridization conditions (e.g., hybridization to filter bound DNA in 6× Sodium chloride/Sodium citrate (SSC) at about 45 degrees Celsius, followed by one or more washes in 0.2×SSC, 0.1% SDS at about 50-65 degrees Celsius), under highly stringent conditions (e.g., hybridization to filter bound DNA in 6× sodium chloride/Sodium citrate (SSC) at about 45 degrees Celsius, followed by one or more washes in 0.1×SSC, 0.2% SDS at about 68 degrees Celsius), or under other stringent hybridization conditions which are known to those of skill in the art (see, for example, Ausubel, F. M. et al., eds., 1989 Current protocol in Molecular Biology, Green publishing associates, Inc., and John Wiley & Sons Inc., New York, at pages 6.3.1-6.3.6 and 2.10.3). Polynucleotides encoding these polypeptides are also encompassed by the invention.

[0112] By a polypeptide having an amino acid sequence at least, for example, 95% “identical” to a query amino acid sequence, it is intended that the amino acid sequence of the subject polypeptide is identical to the query sequence except that the subject polypeptide sequence may include up to five amino acid alterations per each 100 amino acids of the query amino acid sequence. In other words, to obtain a polypeptide having an amino acid sequence at least 95% identical to a query amino acid sequence, up to 5% of the amino acid residues in the subject sequence may be inserted, deleted, or substituted with another amino acid. These alterations of the reference sequence may occur at the amino- or carboxy-terminal positions of the reference amino acid sequence or anywhere between those terminal positions, interspersed either individually among residues in the reference sequence or in one or more contiguous groups within the reference sequence.

[0113] As a practical matter, whether any particular polypeptide is at least 80%, 85%, 90%, 95%, 96%, 97%, 98% or 99% identical to, for instance, the amino acid sequence of an albumin fusion protein of the invention or a fragment thereof (such as a Therapeutic protein portion of the albumin fusion protein or an albumin portion of the albumin fusion protein), can be determined conventionally using known computer programs. A preferred method for determining the best overall match between a query sequence (a sequence of the present invention) and a subject sequence, also referred to as a global sequence alignment, can be determined using the FASTDB computer program based on the algorithm of Brutlag et al. (Comp. App. Biosci. 6:237-245 (1990)). In a sequence alignment the query and subject sequences are either both nucleotide sequences or both amino acid sequences. The result of said global sequence alignment is expressed as percent identity. Preferred parameters used in a FASTDB amino acid alignment are: Matrix=PAM 0, k-tuple=2, Mismatch Penalty=1, Joining Penalty=20, Randomization Group Length=0, Cutoff Score=1, Window Size=sequence length, Gap Penalty=5, Gap Size Penalty=0.05, Window Size=500 or the length of the subject amino acid sequence, whichever is shorter.

[0114] If the subject sequence is shorter than the query sequence due to N- or C-terminal deletions, not because of internal deletions, a manual correction must be made to the results. This is because the FASTDB program does not account for N- and C-terminal truncations of the subject sequence when calculating global percent identity. For subject sequences truncated at the N- and C-termini, relative to the query sequence, the percent identity is corrected by calculating the number of residues of the query sequence that are N- and C-terminal of the subject sequence, which are not matched/aligned with a corresponding subject residue, as a percent of the total bases of the query sequence. Whether a residue is matched/aligned is determined by results of the FASTDB sequence alignment. This percentage is then subtracted from the percent identity, calculated by the above FASTDB program using the specified parameters, to arrive at a final percent identity score. This final percent identity score is what is used for the purposes of the present invention. Only residues to the N- and C-termini of the subject sequence, which are not matched/aligned with the query sequence, are considered for the purposes of manually adjusting the percent identity score. That is, only query residue positions outside the farthest N- and C-terminal residues of the subject sequence.

[0115] For example, a 90 amino acid residue subject sequence is aligned with a 100 residue query sequence to determine percent identity. The deletion occurs at the N-terminus of the subject sequence and therefore, the FASTDB alignment does not show a matching/alignment of the first 10 residues at the N-terminus. The 10 unpaired residues represent 10% of the sequence (number of residues at the N- and C-termini not matched/total number of residues in the query sequence) so 10% is subtracted from the percent identity score calculated by the FASTDB program. If the remaining 90 residues were perfectly matched the final percent identity would be 90%. In another example, a 90 residue subject sequence is compared with a 100 residue query sequence. This time the deletions are internal deletions so there are no residues at the N- or C-termini of the subject sequence which are not matched/aligned with the query. In this case the percent identity calculated by FASTDB is not manually corrected. Once again, only residue positions outside the N- and C-terminal ends of the subject sequence, as displayed in the FASTDB alignment, which are not matched/aligned with the query sequence are manually corrected for. No other manual corrections are to made for the purposes of the present invention.

[0116] The variant will usually have at least 75% (preferably at least about 80%, 90%, 95% or 99%) sequence identity with a length of normal HA or Therapeutic protein which is the same length as the variant. Homology or identity at the nucleotide or amino acid sequence level is determined by BLAST (Basic Local Alignment Search Tool) analysis using the algorithm employed by the programs blastp, blastn, blastx, tblastn and tblastx (Karlin et al., Proc. Natl. Acad. Sci. USA 87: 2264-2268 (1990) and Altschul, J. Mol. Evol. 36: 290-300 (1993), fully incorporated by reference) which are tailored for sequence similarity searching.

[0117] The approach used by the BLAST program is to first consider similar segments between a query sequence and a database sequence, then to evaluate the statistical significance of all matches that are identified and finally to summarize only those matches which satisfy a preselected threshold of significance. For a discussion of basic issues in similarity searching of sequence databases, see Altschul et al., (Nature Genetics 6: 119-129 (1994)) which is fully incorporated by reference. The search parameters for histogram, descriptions, alignments, expect (i.e., the statistical significance threshold for reporting matches against database sequences), cutoff, matrix and filter are at the default settings. The default scoring matrix used by blastp, blastx, tblastn, and tblastx is the BLOSUM62 matrix (Henikoff et al., Proc. Natl. Acad. Sci. USA 89: 10915-10919 (1992), fully incorporated by reference). For blastn, the scoring matrix is set by the ratios of M (i.e., the reward score for a pair of matching residues) to N (i.e., the penalty score for mismatching residues), wherein the default values for M and N are 5 and −4, respectively. Four blastn parameters may be adjusted as follows: Q=10 (gap creation penalty); R=10 (gap extension penalty); wink=1 (generates word hits at every wink^{th} position along the query); and gapw=16 (sets the window width within which gapped alignments are generated). The equivalent Blastp parameter settings were Q=9; R=2; wink=1; and gapw=32. A Bestfit comparison between sequences, available in the GCG package version 10.0, uses DNA parameters GAP=50 (gap creation penalty) and LEN=3 (gap extension penalty) and the equivalent settings in protein comparisons are GAP=8 and LEN=2.

[0118] The polynucleotide variants of the invention may contain alterations in the coding regions, non-coding regions, or both. Especially preferred are polynucleotide variants containing alterations which produce silent substitutions, additions, or deletions, but do not alter the properties or activities of the encoded polypeptide. Nucleotide variants produced by silent substitutions due to the degeneracy of the genetic code are preferred. Moreover, polypeptide variants in which less than 50, less than 40, less than 30, less than 20, less than 10, or 5-50, 5-25, 5-10, 1-5, or 1-2 amino acids are substituted, deleted, or added in any combination are also preferred. Polynucleotide variants can be produced for a variety of reasons, e.g., to optimize codon expression for a particular host (change codons in the human mRNA to those preferred by a bacterial host, such as, yeast or E. coli).

[0119] In a preferred embodiment, a polynucleotide of the invention which encodes the albumin portion of an albumin fusion protein is optimized for expression in yeast or mammalian cells. In a further preferred embodiment, a polynucleotide of the invention which encodes the Therapeutic protein portion of an albumin fusion protein is optimized for expression in yeast or mammalian cells. In a still further preferred embodiment, a polynucleotide encoding an albumin fusion protein of the invention is optimized for expression in yeast or mammalian cells.

[0120] In an alternative embodiment, a codon optimized polynucleotide which encodes a Therapeutic protein portion of an albumin fusion protein does not hybridize to the wild type polynucleotide encoding the Therapeutic protein under stringent hybridization conditions as described herein. In a further embodiment, a codon optimized polynucleotide which encodes an albumin portion of an albumin fusion protein does not hybridize to the wild type polynucleotide encoding the albumin protein under stringent hybridization conditions as described herein. In another embodiment, a codon optimized polynucleotide which encodes an albumin fusion protein does not hybridize to the wild type polynucleotide encoding the Therapeutic protein portion or the albumin protein portion under stringent hybridization conditions as described herein.

[0121] In an additional embodiment, a polynucleotide which encodes a Therapeutic protein portion of an albumin fusion protein does not comprise, or alternatively consist of, the naturally occurring sequence of that Therapeutic protein. In a further embodiment, a polynucleotide which encodes an albumin protein portion of an albumin fusion protein does not comprise, or alternatively consist of, the naturally occurring sequence of albumin protein. In an alternative embodiment, a polynucleotide which encodes an albumin fusion protein does not comprise, or alternatively consist of, the naturally occurring sequence of a Therapeutic protein portion or the albumin protein portion.

[0122] Naturally occurring variants are called “allelic variants,” and refer to one of several alternate forms of a gene occupying a given locus on a chromosome of an organism. (Genes II, Lewin, B., ed., John Wiley & Sons, New York (1985)). These allelic variants can vary at either the polynucleotide and/or polypeptide level and are included in the present invention. Alternatively, non-naturally occurring variants may be produced by mutagenesis techniques or by direct synthesis.

[0123] Using known methods of protein engineering and recombinant DNA technology, variants may be generated to improve or alter the characteristics of the polypeptides of the present invention. For instance, one or more amino acids can be deleted from the N-terminus or C-terminus of the polypeptide of the present invention without substantial loss of biological function. As an example, Ron et al. (J. Biol. Chem. 268: 2984-2988 (1993)) reported variant KGF proteins having heparin binding activity even after deleting 3, 8, or 27 amino-terminal amino acid residues. Similarly, Interferon gamma exhibited up to ten times higher activity after deleting 8-10 amino acid residues from the carboxy terminus of this protein. (Dobeli et al., J. Biotechnology 7:199-216 (1988).)

[0124] Moreover, ample evidence demonstrates that variants often retain a biological activity similar to that of the naturally occurring protein. For example, Gayle and coworkers (J. Biol. Chem. 268:22105-22111 (1993)) conducted extensive mutational analysis of human cytokine IL-1a. They used random mutagenesis to generate over 3,500 individual IL-1a mutants that averaged 2.5 amino acid changes per variant over the entire length of the molecule. Multiple mutations were examined at every possible amino acid position. The investigators found that “[m]ost of the molecule could be altered with little effect on either [binding or biological activity].” In fact, only 23 unique amino acid sequences, out of more than 3,500 nucleotide sequences examined, produced a protein that significantly differed in activity from wild-type.

[0125] Furthermore, even if deleting one or more amino acids from the N-terminus or C-terminus of a polypeptide results in modification or loss of one or more biological functions, other biological activities may still be retained. For example, the ability of a deletion variant to induce and/or to bind antibodies which recognize the secreted form will likely be retained when less than the majority of the residues of the secreted form are removed from the N-terminus or C-terminus. Whether a particular polypeptide lacking N- or C-terminal residues of a protein retains such immunogenic activities can readily be determined by routine methods described herein and otherwise known in the art.

[0126] Thus, the invention further includes polypeptide variants which have a functional activity (e.g., biological activity and/or therapeutic activity). In one embodiment, the invention provides variants of albumin fusion proteins that have a functional activity (e.g., biological activity and/or therapeutic activity) that corresponds to one or more biological and/or therapeutic activities of the Therapeutic protein corresponding to the Therapeutic protein portion of the albumin fusion protein. In another embodiment, the invention provides variants of albumin fusion proteins that have a functional activity (e.g., biological activity and/or therapeutic activity) that corresponds to one or more biological and/or therapeutic activities of the Therapeutic protein corresponding to the Therapeutic protein portion of the albumin fusion protein. Such variants include deletions, insertions, inversions, repeats, and substitutions selected according to general rules known in the art so as have little effect on activity. Polynucleotides encoding such variants are also encompassed by the invention.

[0127] In preferred embodiments, the variants of the invention have conservative substitutions. By “conservative substitutions” is intended swaps within groups such as replacement of the aliphatic or hydrophobic amino acids Ala, Val, Leu and Ile; replacement of the hydroxyl residues Ser and Thr; replacement of the acidic residues Asp and Glu; replacement of the amide residues Asn and Gln, replacement of the basic residues Lys, Arg, and His; replacement of the aromatic residues Phe, Tyr, and Trp, and replacement of the small-sized amino acids Ala, Ser, Thr, Met, and Gly.

[0128] Guidance concerning how to make phenotypically silent amino acid substitutions is provided, for example, in Bowie et al., “Deciphering the Message in Protein Sequences: Tolerance to Amino Acid Substitutions,” Science 247:1306-1310 (1990), wherein the authors indicate that there are two main strategies for studying the tolerance of an amino acid sequence to change.

[0129] The first strategy exploits the tolerance of amino acid substitutions by natural selection during the process of evolution. By comparing amino acid sequences in different species, conserved amino acids can be identified. These conserved amino acids are likely important for protein function. In contrast, the amino acid positions where substitutions have been tolerated by natural selection indicates that these positions are not critical for protein function. Thus, positions tolerating amino acid substitution could be modified while still maintaining biological activity of the protein.

[0130] The second strategy uses genetic engineering to introduce amino acid changes at specific positions of a cloned gene to identify regions critical for protein function. For example, site directed mutagenesis or alanine-scanning mutagenesis (introduction of single alanine mutations at every residue in the molecule) can be used. See Cunningham and Wells, Science 244:1081-1085 (1989). The resulting mutant molecules can then be tested for biological activity.

[0131] As the authors state, these two strategies have revealed that proteins are surprisingly tolerant of amino acid substitutions. The authors further indicate which amino acid changes are likely to be permissive at certain amino acid positions in the protein. For example, most buried (within the tertiary structure of the protein) amino acid residues require nonpolar side chains, whereas few features of surface side chains are generally conserved. Moreover, tolerated conservative amino acid substitutions involve replacement of the aliphatic or hydrophobic amino acids Ala, Val, Leu and Ile; replacement of the hydroxyl residues Ser and Thr; replacement of the acidic residues Asp and Glu; replacement of the amide residues Asn and Gln, replacement of the basic residues Lys, Arg, and His; replacement of the aromatic residues Phe, Tyr, and Trp, and replacement of the small-sized amino acids Ala, Ser, Thr, Met, and Gly. Besides conservative amino acid substitution, variants of the present invention include (i) polypeptides containing substitutions of one or more of the non-conserved amino acid residues, where the substituted amino acid residues may or may not be one encoded by the genetic code, or (ii) polypeptides containing substitutions of one or more of the amino acid residues having a substituent group, or (iii) polypeptides which have been fused with or chemically conjugated to another compound, such as a compound to increase the stability and/or solubility of the polypeptide (for example, polyethylene glycol), (iv) polypeptide containing additional amino acids, such as, for example, an IgG Fc fusion region peptide. Such variant polypeptides are deemed to be within the scope of those skilled in the art from the teachings herein.

[0132] For example, polypeptide variants containing amino acid substitutions of charged amino acids with other charged or neutral amino acids may produce proteins with improved characteristics, such as less aggregation. Aggregation of pharmaceutical formulations both reduces activity and increases clearance due to the aggregate's immunogenic activity. See Pinckard et al., Clin. Exp. Immunol. 2:331-340 (1967); Robbins et al., Diabetes 36: 838-845 (1987); Cleland et al., Crit. Rev. Therapeutic Drug Carrier Systems 10:307-377 (1993).

[0133] In specific embodiments, the polypeptides of the invention comprise, or alternatively, consist of, fragments or variants of the amino acid sequence of an albumin fusion protein, the amino acid sequence of a Therapeutic protein and/or human serum albumin, wherein the fragments or variants have 1-5, 5-10, 5-25, 5-50, 10-50 or 50-150, amino acid residue additions, substitutions, and/or deletions when compared to the reference amino acid sequence. In preferred embodiments, the amino acid substitutions are conservative. Nucleic acids encoding these polypeptides are also encompassed by the invention.

[0134] The polypeptide of the present invention can be composed of amino acids joined to each other by peptide bonds or modified peptide bonds, i.e., peptide isosteres, and may contain amino acids other than the 20 gene-encoded amino acids. The polypeptides may be modified by either natural processes, such as post-translational processing, or by chemical modification techniques which are well known in the art. Such modifications are well described in basic texts and in more detailed monographs, as well as in a voluminous research literature. Modifications can occur anywhere in a polypeptide, including the peptide backbone, the amino acid side-chains and the amino or carboxyl termini. It will be appreciated that the same type of modification may be present in the same or varying degrees at several sites in a given polypeptide. Also, a given polypeptide may contain many types of modifications. Polypeptides may be branched, for example, as a result of ubiquitination, and they may be cyclic, with or without branching. Cyclic, branched, and branched cyclic polypeptides may result from posttranslation natural processes or may be made by synthetic methods. Modifications include acetylation, acylation, ADP-ribosylation, amidation, covalent attachment of flavin, covalent attachment of a heme moiety, covalent attachment of a nucleotide or nucleotide derivative, covalent attachment of a lipid or lipid derivative, covalent attachment of phosphotidylinositol, cross-linking, cyclization, disulfide bond formation, demethylation, formation of covalent cross-links, formation of cysteine, formation of pyroglutamate, formylation, gamma-carboxylation, glycosylation, GPI anchor formation, hydroxylation, iodination, methylation, myristylation, oxidation, pegylation, proteolytic processing, phosphorylation, prenylation, racemization, selenoylation, sulfation, transfer-RNA mediated addition of amino acids to proteins such as arginylation, and ubiquitination. (See, for instance, PROTEINS—STRUCTURE AND MOLECULAR PROPERTIES, 2nd Ed., T. E. Creighton, W.H. Freeman and Company, New York (1993); POST-TRANSLATIONAL COVALENT MODIFICATION OF PROTEINS, B. C. Johnson, Ed., Academic Press, New York, pgs. 1-12 (1983); Seifter et al., Meth. Enzymol. 182:626-646 (1990); Rattan et al., Ann. N.Y. Acad. Sci. 663:48-62 (1992)).

[0135] Functional Activity

[0136] “A polypeptide having functional activity” refers to a polypeptide capable of displaying one or more known functional activities associated with the full-length, pro-protein, and/or mature form of a Therapeutic protein. Such functional activities include, but are not limited to, biological activity, antigenicity [ability to bind (or compete with a polypeptide for binding) to an anti-polypeptide antibody], immunogenicity (ability to generate antibody which binds to a specific polypeptide of the invention), ability to form multimers with polypeptides of the invention, and ability to bind to a receptor or ligand for a polypeptide.

[0137] “A polypeptide having biological activity” refers to a polypeptide exhibiting activity similar to, but not necessarily identical to, an activity of a Therapeutic protein of the present invention, including mature forms, as measured in a particular biological assay, with or without dose dependency. In the case where dose dependency does exist, it need not be identical to that of the polypeptide, but rather substantially similar to the dose-dependence in a given activity as compared to the polypeptide of the present invention (i.e., the candidate polypeptide will exhibit greater activity or not more than about 25-fold less and, preferably, not more than about tenfold less activity, and most preferably, not more than about three-fold less activity relative to the polypeptide of the present invention).

[0138] In preferred embodiments, an albumin fusion protein of the invention has at least one biological and/or therapeutic activity associated with the Therapeutic protein portion (or fragment or variant thereof) when it is not fused to albumin.

[0139] In additional preferred embodiments, the albumin fusion protein of the invention has an increased plasma stability compared to the Therapeutic protein portion (or fragment or variant thereof) in an unfused state. Plasma stability of the albumin fusion protein of the invention or of the unfused Therapeutic protein portion (or fragment or variant thereof) can be assayed using or routinely modifying assays known in the art.

[0140] The albumin fusion proteins of the invention can be assayed for functional activity (e.g., biological activity) using or routinely modifying assays known in the art, as well as assays described herein. Additionally, one of skill in the art may routinely assay fragments of a Therapeutic protein corresponding to a Therapeutic protein portion of an albumin fusion protein, for activity using assays referenced in its corresponding row of Table 1 (e.g., in column 3 of Table 1). Further, one of skill in the art may routinely assay fragments of an albumin protein corresponding to an albumin protein portion of an albumin fusion protein, for activity using assays known in the art and/or as described in the Examples section below.

[0141] For example, in one embodiment where one is assaying for the ability of an albumin fusion protein to bind or compete with a Therapeutic protein for binding to an anti-Therapeutic polypeptide antibody and/or anti-albumin antibody, various immunoassays known in the art can be used, including but not limited to, competitive and non-competitive assay systems using techniques such as radioimmunoassays, ELISA (enzyme linked immunosorbent assay), “sandwich” immunoassays, immunoradiometric assays, gel diffusion precipitation reactions, immunodiffusion assays, in situ immunoassays (using colloidal gold, enzyme or radioisotope labels, for example), western blots, precipitation reactions, agglutination assays (e.g., gel agglutination assays, hemagglutination assays), complement fixation assays, immunofluorescence assays, protein A assays, and immunoelectrophoresis assays, etc. In one embodiment, antibody binding is detected by detecting a label on the primary antibody. In another embodiment, the primary antibody is detected by detecting binding of a secondary antibody or reagent to the primary antibody. In a further embodiment, the secondary antibody is labeled. Many means are known in the art for detecting binding in an immunoassay and are within the scope of the present invention.

[0142] In a preferred embodiment, where a binding partner (e.g., a receptor or a ligand) of a Therapeutic protein is identified, binding to that binding partner by an albumin fusion protein which comprises that Therapeutic protein as the Therapeutic protein portion of the fusion can be assayed, e.g., by means well-known in the art, such as, for example, reducing and non-reducing gel chromatography, protein affinity chromatography, and affinity blotting. See generally, Phizicky et al., Microbiol. Rev. 59:94-123 (1995). In another embodiment, the ability of physiological correlates of an albumin fusion protein to bind to a substrate(s) of the Therapeutic polypeptide corresponding to the Therapeutic protein portion of the fusion can be routinely assayed using techniques known in the art.

[0143] In an alternative embodiment, where the ability of an albumin fusion protein to multimerize is being evaluated, association with other components of the multimer can be assayed, e.g., by means well-known in the art, such as, for example, reducing and non-reducing gel chromatography, protein affinity chromatography, and affinity blotting. See generally, Phizicky et al., supra.

[0144] In preferred embodiments, an albumin fusion protein comprising all or a portion of an antibody that binds a Therapeutic protein, has at least one biological and/or therapeutic activity (e.g., to specifically bind a polypeptide or epitope) associated with the antibody that binds a Therapeutic protein (or fragment or variant thereof) when it is not fused to albumin. In other preferred embodiments, the biological activity and/or therapeutic activity of an albumin fusion protein comprising all or a portion of an antibody that binds a Therapeutic protein is the inhibition (i.e., antagonism) or activation (i.e., agonism) of one or more of the biological activities and/or therapeutic activities associated with the polypeptide that is specifically bound by antibody that binds a Therapeutic protein.

[0145] Albumin fusion proteins comprising at least a fragment or variant of an antibody that binds a Therapeutic protein may be characterized in a variety of ways. In particular, albumin fusion proteins comprising at least a fragment or variant of an antibody that binds a Therapeutic protein may be assayed for the ability to specifically bind to the same antigens specifically bound by the antibody that binds a Therapeutic protein corresponding to the Therapeutic protein portion of the albumin fusion protein using techniques described herein or routinely modifying techniques known in the art.

[0146] Assays for the ability of the albumin fusion proteins (e.g., comprising at least a fragment or variant of an antibody that binds a Therapeutic protein) to (specifically) bind a specific protein or epitope may be performed in solution (e.g., Houghten, Bio/Techniques 13:412-421 (1992)), on beads (e.g., Lam, Nature 354:82-84 (1991)), on chips (e.g., Fodor, Nature 364:555-556 (1993)), on bacteria (e.g., U.S. Pat. No. 5,223,409), on spores (e.g., U.S. Pat. Nos. 5,571,698; 5,403,484; and 5,223,409), on plasmids (e.g., Cull et al., Proc. Natl. Acad. Sci. USA 89:1865-1869 (1992)) or on phage (e.g., Scott and Smith, Science 249:386-390 (1990); Devlin, Science 249:404-406 (1990); Cwirla et al., Proc. Natl. Acad. Sci. USA 87:6378-6382 (1990); and Felici, J. Mol. Biol. 222:301-310 (1991)) (each of these references is incorporated herein in its entirety by reference). Albumin fusion proteins comprising at least a fragment or variant of a Therapeutic antibody may also be assayed for their specificity and affinity for a specific protein or epitope using or routinely modifying techniques described herein or otherwise known in the art.

[0147] The albumin fusion proteins comprising at least a fragment or variant of an antibody that binds a Therapeutic protein may be assayed for cross-reactivity with other antigens (e.g., molecules that have sequence/structure conservation with the molecule(s) specifically bound by the antibody that binds a Therapeutic protein (or fragment or variant thereof) corresponding to the Therapeutic protein portion of the albumin fusion protein of the invention) by any method known in the art.

[0148] Immunoassays which can be used to analyze (immunospecific) binding and cross-reactivity include, but are not limited to, competitive and non-competitive assay systems using techniques such as western blots, radioimmunoassays, ELISA (enzyme linked immunosorbent assay), “sandwich” immunoassays, immunoprecipitation assays, precipitin reactions, gel diffusion precipitin reactions, immunodiffusion assays, agglutination assays, complement-fixation assays, immunoradiometric assays, fluorescent immunoassays, and protein A immunoassays, to name but a few. Such assays are routine and well known in the art (see, e.g., Ausubel et al, eds, 1994, Current Protocols in Molecular Biology, Vol. 1, John Wiley & Sons, Inc., New York, which is incorporated by reference herein in its entirety). Exemplary immunoassays are described briefly below (but are not intended by way of limitation).

[0149] Immunoprecipitation protocols generally comprise lysing a population of cells in a lysis buffer such as RIPA buffer (1% NP-40 or Triton X-100, 1% sodium deoxycholate, 0.1% SDS, 0.15 M NaCl, 0.01 M sodium phosphate at pH 7.2, 1% Trasylol) supplemented with protein phosphatase and/or protease inhibitors (e.g., EDTA, PMSF, aprotinin, sodium vanadate), adding the albumin fusion protein of the invention (e.g., comprising at least a fragment or variant of an antibody that binds a Therapeutic protein) to the cell lysate, incubating for a period of time (e.g., 1 to 4 hours) at 40 degrees C., adding sepharose beads coupled to an anti-albumin antibody, for example, to the cell lysate, incubating for about an hour or more at 40 degrees C., washing the beads in lysis buffer and resuspending the beads in SDS/sample buffer. The ability of the albumin fusion protein to immunoprecipitate a particular antigen can be assessed by, e.g., western blot analysis. One of skill in the art would be knowledgeable as to the parameters that can be modified to increase the binding of the albumin fusion protein to an antigen and decrease the background (e.g., pre-clearing the cell lysate with sepharose beads). For further discussion regarding immunoprecipitation protocols see, e.g., Ausubel et al, eds, 1994, Current Protocols in Molecular Biology, Vol. 1, John Wiley & Sons, Inc., New York at 10.16.1.

[0150] Western blot analysis generally comprises preparing protein samples, electrophoresis of the protein samples in a polyacrylamide gel (e.g., 8%-20% SDS-PAGE depending on the molecular weight of the antigen), transferring the protein sample from the polyacrylamide gel to a membrane such as nitrocellulose, PVDF or nylon, blocking the membrane in blocking solution (e.g., PBS with 3% BSA or non-fat milk), washing the membrane in washing buffer (e.g., PBS-Tween 20), applying the albumin fusion protein of the invention (diluted in blocking buffer) to the membrane, washing the membrane in washing buffer, applying a secondary antibody (which recognizes the albumin fusion protein, e.g., an anti-human serum albumin antibody) conjugated to an enzymatic substrate (e.g., horseradish peroxidase or alkaline phosphatase) or radioactive molecule (e.g., ³²P or ¹²⁵I) diluted in blocking buffer, washing the membrane in wash buffer, and detecting the presence of the antigen. One of skill in the art would be knowledgeable as to the parameters that can be modified to increase the signal detected and to reduce the background noise. For further discussion regarding western blot protocols see, e.g., Ausubel et al, eds, 1994, Current Protocols in Molecular Biology, Vol. 1, John Wiley & Sons, Inc., New York at 10.8.1.

[0151] ELISAs comprise preparing antigen, coating the well of a 96-well microtiter plate with the antigen, washing away antigen that did not bind the wells, adding the albumin fusion protein (e.g., comprising at least a fragment or variant of an antibody that binds a Therapeutic protein) of the invention conjugated to a detectable compound such as an enzymatic substrate (e.g., horseradish peroxidase or alkaline phosphatase) to the wells and incubating for a period of time, washing away unbound or non-specifically bound albumin fusion proteins, and detecting the presence of the albumin fusion proteins specifically bound to the antigen coating the well. In ELISAs the albumin fusion protein does not have to be conjugated to a detectable compound; instead, a second antibody (which recognizes albumin fusion protein) conjugated to a detectable compound may be added to the well. Further, instead of coating the well with the antigen, the albumin fusion protein may be coated to the well. In this case, the detectable molecule could be the antigen conjugated to a detectable compound such as an enzymatic substrate (e.g., horseradish peroxidase or alkaline phosphatase). One of skill in the art would be knowledgeable as to the parameters that can be modified to increase the signal detected as well as other variations of ELISAs known in the art. For further discussion regarding ELISAs see, e.g., Ausubel et al, eds, 1994, Current Protocols in Molecular Biology, Vol. 1, John Wiley & Sons, Inc., New York at 11.2.1.

[0152] The binding affinity of an albumin fusion protein to a protein, antigen, or epitope and the off-rate of an albumin fusion protein-protein/antigen/epitope interaction can be determined by competitive binding assays. One example of a competitive binding assay is a radioimmunoassay comprising the incubation of labeled antigen (e.g., ³H or ¹²⁵I) with the albumin fusion protein of the invention in the presence of increasing amounts of unlabeled antigen, and the detection of the antibody bound to the labeled antigen. The affinity of the albumin fusion protein for a specific protein, antigen, or epitope and the binding off-rates can be determined from the data by Scatchard plot analysis. Competition with a second protein that binds the same protein, antigen or epitope as the albumin fusion protein, can also be determined using radioimmunoassays. In this case, the protein, antigen or epitope is incubated with an albumin fusion protein conjugated to a labeled compound (e.g., ³H or ¹²⁵I) in the presence of increasing amounts of an unlabeled second protein that binds the same protein, antigen, or epitope as the albumin fusion protein of the invention.

[0153] In a preferred embodiment, BIAcore kinetic analysis is used to determine the binding on and off rates of albumin fusion proteins of the invention to a protein, antigen or epitope. BIAcore kinetic analysis comprises analyzing the binding and dissociation of albumin fusion proteins, or specific polypeptides, antigens or epitopes from chips with immobilized specific polypeptides, antigens or epitopes or albumin fusion proteins, respectively, on their surface.

[0154] Antibodies that bind a Therapeutic protein corresponding to the Therapeutic protein portion of an albumin fusion protein may also be described or specified in terms of their binding affinity for a given protein or antigen, preferably the antigen which they specifically bind. Preferred binding affinities include those with a dissociation constant or Kd less than 5×10⁻² M, 10⁻² M, 5×10⁻³ M, 10⁻³ M, 5×10⁻⁴ M, 10⁻⁴ M. More preferred binding affinities include those with a dissociation constant or Kd less than 5×10⁻⁵ M, 10⁻⁵ M, 5×10⁻⁶ M, 10⁻⁶M, 5×10⁻⁷ M, 10⁻⁷ M, 5×10⁻⁸ M or 10⁻⁸ M. Even more preferred binding affinities include those with a dissociation constant or Kd less than 5×10⁻⁹ M, 10⁻⁹ M, 5×10⁻¹⁰ M, 10⁻¹⁰ M, 5×10⁻¹¹ M, 10⁻¹¹ M, 5×10⁻¹² M, 10⁻¹² M, 5×10⁻¹³ M, 10⁻¹³ M, 5×10⁻¹⁴ M, 10⁻¹⁴ M, 5×10⁻¹⁵ M, or 10⁻¹⁵ M. In preferred embodiments, albumin fusion proteins comprising at least a fragment or variant of an antibody that binds a Therapeutic protein, has an affinity for a given protein or epitope similar to that of the corresponding antibody (not fused to albumin) that binds a Therapeutic protein, taking into account the valency of the albumin fusion protein (comprising at least a fragment or variant of an antibody that binds a Therapeutic protein) and the valency of the corresponding antibody. In addition, assays described herein (see Examples and Table 1) and otherwise known in the art may routinely be applied to measure the ability of albumin fusion proteins and fragments, variants and derivatives thereof to elicit biological activity and/or Therapeutic activity (either in vitro or in vivo) related to either the Therapeutic protein portion and/or albumin portion of the albumin fusion protein. Other methods will be known to the skilled artisan and are within the scope of the invention.

[0155] Albumin

[0156] As described above, an albumin fusion protein of the invention comprises at least a fragment or variant of a Therapeutic protein and at least a fragment or variant of human serum albumin, which are associated with one another, preferably by genetic fusion.

[0157] An additional embodiment comprises at least a fragment or variant of a Therapeutic protein and at least a fragment or variant of human serum albumin, which are linked to one another by chemical conjugation.

[0158] The terms, human serum albumin (HSA) and human albumin (HA) are used interchangeably herein. The terms, “albumin and “serum albumin” are broader, and encompass human serum albumin (and fragments and variants thereof) as well as albumin from other species (and fragments and variants thereof).

[0159] As used herein, “albumin” refers collectively to albumin protein or amino acid sequence, or an albumin fragment or variant, having one or more functional activities (e.g., biological activities) of albumin. In particular, “albumin” refers to human albumin or fragments thereof (see for example, EP 201 239, EP 322 094 WO 97/24445, WO95/23857) especially the mature form of human albumin as shown in FIG. 1 and SEQ ID NO:1, or albumin from other vertebrates or fragments thereof, or analogs or variants of these molecules or fragments thereof.

[0160] In preferred embodiments, the human serum albumin protein used in the albumin fusion proteins of the invention contains one or both of the following sets of point mutations with reference to SEQ ID NO:1: Leu-407 to Ala, Leu-408 to Val, Val-409 to Ala, and Arg-410 to Ala; or Arg-410 to A, Lys-413 to Gln, and Lys-414 to Gln (see, e.g., International Publication No. WO95/23857, hereby incorporated in its entirety by reference herein). In even more preferred embodiments, albumin fusion proteins of the invention that contain one or both of above-described sets of point mutations have improved stability/resistance to yeast Yap3p proteolytic cleavage, allowing increased production of recombinant albumin fusion proteins expressed in yeast host cells.

[0161] As used herein, a portion of albumin sufficient to prolong the therapeutic activity or plasma stability or shelf-life of the Therapeutic protein refers to a portion of albumin sufficient in length or structure to stabilize or prolong the therapeutic activity or plasma stability of the protein so that the shelf life or plasma stability of the Therapeutic protein portion of the albumin fusion protein is prolonged or extended compared to the shelf-life or plasma stability in the non-fusion state. The albumin portion of the albumin fusion proteins may comprise the full length of the HA sequence as described above, or may include one or more fragments thereof that are capable of stabilizing or prolonging the therapeutic activity. Such fragments may be of 10 or more amino acids in length or may include about 15, 20, 25, 30, 50, or more contiguous amino acids from the HA sequence or may include part or all of specific domains of HA. For instance, one or more fragments of HA spanning the first two immunoglobulin-like domains may be used. In a preferred embodiment, the HA fragment is the mature form of HA.

[0162] The albumin portion of the albumin fusion proteins of the invention may be a variant of normal HA. The Therapeutic protein portion of the albumin fusion proteins of the invention may also be variants of the Therapeutic proteins as described herein. The term “variants” includes insertions, deletions and substitutions, either conservative or non conservative, where such changes do not substantially alter one or more of the oncotic, useful ligand-binding and non-immunogenic properties of albumin, or the active site, or active domain which confers the therapeutic activities of the Therapeutic proteins.

[0163] In particular, the albumin fusion proteins of the invention may include naturally occurring polymorphic variants of human albumin and fragments of human albumin, for example those fragments disclosed in EP 322 094 (namely HA (Pn), where n is 369 to 419). The albumin may be derived from any vertebrate, especially any mammal, for example human, cow, sheep, or pig. Non-mammalian albumins include, but are not limited to, hen and salmon. The albumin portion of the albumin fusion protein may be from a different animal than the Therapeutic protein portion.

[0164] Generally speaking, an HA fragment or variant will be at least 100 amino acids long, preferably at least 150 amino acids long. The HA variant may consist of or alternatively comprise at least one whole domain of HA, for example domains 1 (amino acids 1-194 of SEQ ID NO:1), domain 2 (amino acids 195-387 of SEQ ID NO:1), domain 3 (amino acids 388-585 of SEQ ID NO:1), domains 1 and 2 (1-387 of SEQ ID NO:1), domains 2 and 3 (195-585 of SEQ ID NO: 1) or domains 1 and 3 (amino acids 1-194 of SEQ ID NO:1 and amino acids 388-585 of SEQ ID NO:1). Each domain is itself made up of two homologous subdomains namely 1-105, 120-194, 195-291, 316-387, 388-491 and 512-585, with flexible inter-subdomain linker regions comprising residues Lys106 to Glu119, Glu292 to Va1315 and Glu492 to Ala511.

[0165] Preferably, the albumin portion of an albumin fusion protein of the invention comprises at least one subdomain or domain of HA or conservative modifications thereof. If the fusion is based on subdomains, some or all of the adjacent linker is preferably used to link to the Therapeutic protein moiety.

[0166] Antibodies that Specifically Bind Therapeutic Proteins are Also Therapeutic Proteins

[0167] The present invention also encompasses albumin fusion proteins that comprise at least a fragment or variant of an antibody that specifically binds a Therapeutic protein disclosed in Table 1. It is specifically contemplated that the term “Therapeutic protein” encompasses antibodies that bind a Therapeutic protein (e.g., as Described in column I of Table 1) and fragments and variants thereof. Thus an albumin fusion protein of the invention may contain at least a fragment or variant of a Therapeutic protein, and/or at least a fragment or variant of an antibody that binds a Therapeutic protein.

[0168] Antibody Structure and Background

[0169] The basic antibody structural unit is known to comprise a tetramer. Each tetramer is composed of two identical pairs of polypeptide chains, each pair having one “light” (about 25 kDa) and one “heavy” chain (about 50-70 kDa). The amino-terminal portion of each chain includes a variable region of about 100 to 110 or more amino acids primarily responsible for antigen recognition. The carboxy-terminal portion of each chain defines a constant region primarily responsible for effector function. Human light chains are classified as kappa and lambda light chains. Heavy chains are classified as mu, delta, gamma, alpha, or epsilon, and define the antibody's isotype as IgM, IgD, IgG, IgA, and IgE, respectively. See generally, Fundamental Immunology Chapters 3-5 (Paul, W., ed., 4th ed. Raven Press, N.Y. (1998)) (incorporated by reference in its entirety for all purposes). The variable regions of each light/heavy chain pair form the antibody binding site.

[0170] Thus, an intact IgG antibody has two binding sites. Except in bifunctional or bispecific antibodies, the two binding sites are the same.

[0171] The chains all exhibit the same general structure of relatively conserved framework regions (FR) joined by three hypervariable regions, also called complementarity determining regions or CDRs. The CDR regions, in general, are the portions of the antibody which make contact with the antigen and determine its specificity. The CDRs from the heavy and the light chains of each pair are aligned by the framework regions, enabling binding to a specific epitope. From N-terminal to C-terminal, both light and heavy chains variable regions comprise the domains FR1, CDR1, FR2, CDR2, FR3, CDR3 and FR4. The variable regions are connected to the heavy or light chain constant region. The assignment of amino acids to each domain is in accordance with the definitions of Kabat Sequences of Proteins of Immunological Interest (National Institutes of Health, Bethesda, Md. (1987 and 1991)), or Chothia & Lesk J Mol. Biol. 196:901-917 (1987); Chothia et al. Nature 342:878-883 (1989).

[0172] As used herein, “antibody” refers to immunoglobulin molecules and immunologically active portions of immunoglobulin molecules, i.e., molecules that contain an antigen binding site that specifically binds an antigen (e.g., a molecule containing one or more CDR regions of an antibody). Antibodies that may correspond to a Therapeutic protein portion of an albumin fusion protein include, but are not limited to, monoclonal, multispecific, human, humanized or chimeric antibodies, single chain antibodies (e.g., single chain Fvs), Fab fragments, F(ab′) fragments, fragments produced by a Fab expression library, anti-idiotypic (anti-Id) antibodies (including, e.g., anti-Id antibodies specific to antibodies of the invention), and epitope-binding fragments of any of the above (e.g., VH domains, VL domains, or one or more CDR regions).

[0173] Antibodies that Bind Therapeutic Proteins

[0174] The present invention encompasses albumin fusion proteins that comprise at least a fragment or variant of an antibody that binds a Therapeutic Protein (e.g., as disclosed in Table 1) or fragment or variant thereof.

[0175] Antibodies that bind a Therapeutic protein (or fragment or variant thereof) may be from any animal origin, including birds and mammals. Preferably, the antibodies are human, murine (e.g., mouse and rat), donkey, sheep, rabbit, goat, guinea pig, camel, horse, or chicken antibodies. Most preferably, the antibodies are human antibodies. As used herein, “human” antibodies include antibodies having the amino acid sequence of a human immunoglobulin and include antibodies isolated from human immunoglobulin libraries and xenomice or other organisms that have been genetically engineered to produce human antibodies.

[0176] The antibody molecules that bind to a Therapeutic protein and that may correspond to a Therapeutic protein portion of an albumin fusion protein of the invention can be of any type (e.g., IgG, IgE, IgM, IgD, IgA and IgY), class (e.g., IgG1, IgG2, IgG3, IgG4, IgA1 and IgA2) or subclass of immunoglobulin molecule. In preferred embodiments, the antibody molecules that bind to a Therapeutic protein and that may correspond to a Therapeutic protein portion of an albumin fusion protein are IgG1. In other preferred embodiments, the immunoglobulin molecules that bind to a Therapeutic protein and that may correspond to a Therapeutic protein portion of an albumin fusion protein are IgG2. In other preferred embodiments, the immunoglobulin molecules that bind to a Therapeutic protein and that may correspond to a Therapeutic protein portion of an albumin fusion protein are IgG4.

[0177] Most preferably the antibodies that bind to a Therapeutic protein and that may correspond to a Therapeutic protein portion of an albumin fusion protein are human antigen-binding antibody fragments of the present invention and include, but are not limited to, Fab, Fab′ and F(ab′)2, Fd, single-chain Fvs (scFv), single-chain antibodies, disulfide-linked Fvs (sdFv) and fragments comprising either a VL or VH domain. Antigen-binding antibody fragments, including single-chain antibodies, may comprise the variable region(s) alone or in combination with the entirety or a portion of the following: hinge region, CH1, CH2, and CH3 domains.

[0178] The antibodies that bind to a Therapeutic protein and that may correspond to a Therapeutic protein portion of an albumin fusion protein may be monospecific, bispecific, trispecific or of greater multispecificity. Multispecific antibodies may be specific for different epitopes of a Therapeutic protein or may be specific for both a Therapeutic protein as well as for a heterologous epitope, such as a heterologous polypeptide or solid support material. See, e.g., PCT publications WO 93/17715; WO 92/08802; WO 91/00360; WO 92/05793; Tutt, et al., J. Immunol. 147:60-69 (1991); U.S. Pat. Nos. 4,474,893; 4,714,681; 4,925,648; 5,573,920; 5,601,819; Kostelny et al., J. Immunol. 148:1547-1553 (1992).

[0179] Antibodies that bind a Therapeutic protein (or fragment or variant thereof) may be bispecific or bifunctional which means that the antibody is an artificial hybrid antibody having two different heavy/light chain pairs and two different binding sites. Bispecific antibodies can be produced by a variety of methods including fusion of hybridomas or linking of Fab′ fragments. See, e.g., Songsivilai & Lachmann Clin. Exp. Immunol. 79: 315-321 (1990), Kostelny et al. J Immunol. 148:1547 1553 (1992). In addition, bispecific antibodies may be formed as “diabodies” (Holliger et al. “‘Diabodies’: small bivalent and bispecific antibody fragments” PNAS USA 90:6444-6448 (1993)) or “Janusins” (Traunecker et al. “Bispecific single chain molecules (Janusins) target cytotoxic lymphocytes on HIV infected cells” EMBO J. 10:3655-3659 (1991) and Traunecker et al. “Janusin: new molecular design for bispecific reagents” Int J Cancer Suppl 7:51-52 (1992)).

[0180] The present invention also provides albumin fusion proteins that comprise, fragments or variants (including derivatives) of an antibody described herein or known elsewhere in the art. Standard techniques known to those of skill in the art can be used to introduce mutations in the nucleotide sequence encoding a molecule of the invention, including, for example, site-directed mutagenesis and PCR-mediated mutagenesis which result in amino acid substitutions. Preferably, the variants (including derivatives) encode less than 50 amino acid substitutions, less than 40 amino acid substitutions, less than 30 amino acid substitutions, less than 25 amino acid substitutions, less than 20 amino acid substitutions, less than 15 amino acid substitutions, less than 10 amino acid substitutions, less than 5 amino acid substitutions, less than 4 amino acid substitutions, less than 3 amino acid substitutions, or less than 2 amino acid substitutions relative to the reference VH domain, VHCDR1, VHCDR2, VHCDR3, VL domain, VLCDR1, VLCDR2, or VLCDR3. In specific embodiments, the variants encode substitutions of VHCDR3. In a preferred embodiment, the variants have conservative amino acid substitutions at one or more predicted non-essential amino acid residues.

[0181] Antibodies that bind to a Therapeutic protein and that may correspond to a Therapeutic protein portion of an albumin fusion protein may be described or specified in terms of the epitope(s) or portion(s) of a Therapeutic protein which they recognize or specifically bind. Antibodies which specifically bind a Therapeutic protein or a specific epitope of a Therapeutic protein may also be excluded. Therefore, the present invention encompasses antibodies that specifically bind Therapeutic proteins, and allows for the exclusion of the same. In preferred embodiments, albumin fusion proteins comprising at least a fragment or variant of an antibody that binds a Therapeutic protein, binds the same epitopes as the unfused fragment or variant of that antibody itself.

[0182] Antibodies that bind to a Therapeutic protein and that may correspond to a Therapeutic protein portion of an albumin fusion protein may also be described or specified in terms of their cross-reactivity. Antibodies that do not bind any other analog, ortholog, or homolog of a Therapeutic protein are included. Antibodies that bind polypeptides with at least 95%, at least 90%, at least 85%, at least 80%, at least 75%, at least 70%, at least 65%, at least 60%, at least 55%, and at least 50% sequence identity (as calculated using methods known in the art and described herein) to a Therapeutic protein are also included in the present invention. In specific embodiments, antibodies that bind to a Therapeutic protein and that may correspond to a Therapeutic protein portion of an albumin fusion protein cross-react with murine, rat and/or rabbit homologs of human proteins and the corresponding epitopes thereof. Antibodies that do not bind polypeptides with less than 95%, less than 90%, less than 85%, less than 80%, less than 75%, less than 70%, less than 65%, less than 60%, less than 55%, and less than 50% sequence identity (as calculated using methods known in the art and described herein) to a Therapeutic protein are also included in the present invention. In a specific embodiment, the above-described cross-reactivity is with respect to any single specific antigenic or immunogenic polypeptide, or combination(s) of 2, 3, 4, 5, or more of the specific antigenic and/or immunogenic polypeptides disclosed herein. In preferred embodiments, albumin fusion proteins comprising at least a fragment or variant of an antibody that binds a Therapeutic protein, has similar or substantially identical cross reactivity characteristics compared to the fragment or variant of that particular antibody itself.

[0183] Further included in the present invention are antibodies which bind polypeptides encoded by polynucleotides which hybridize to a polynucleotide encoding a Therapeutic protein under stringent hybridization conditions (as described herein). Antibodies that bind to a Therapeutic protein and that may correspond to a Therapeutic protein portion of an albumin fusion protein of the invention may also be described or specified in terms of their binding affinity to a polypeptide of the invention. Preferred binding affinities include those with a dissociation constant or Kd less than 5×10⁻² M, 10⁻² M, 5×10⁻³ M, 10⁻³ M, 5×10⁻⁴ M, 10⁻⁴ M. More preferred binding affinities include those with a dissociation constant or Kd less than 5×10⁻⁵ M, 10⁻⁵ M, 5×10⁻⁶ M, 10⁻⁶M, 5×10⁻⁷ M, 10⁻⁷ M, 5×10⁻⁸ M or 10⁻⁸ M. Even more preferred binding affinities include those with a dissociation constant or Kd less than 5×10⁻⁹ M, 10⁻⁹ M, 5×10⁻¹⁰ M, 10⁻¹⁰ M, 5×10⁻¹¹ M, 10⁻¹¹ M, 5×10⁻¹² M, 10⁻¹² M, 5×10⁻¹³ M, 10⁻¹³ M, 5×10⁻¹⁴ M, 10⁻¹⁴ M, 5×10⁻¹⁵ M, or 10⁻¹⁵ M. In preferred embodiments, albumin fusion proteins comprising at least a fragment or variant of an antibody that binds a Therapeutic protein, has an affinity for a given protein or epitope similar to that of the corresponding antibody (not fused to albumin) that binds a Therapeutic protein, taking into account the valency of the albumin fusion protein (comprising at least a fragment or variant of an antibody that binds a Therapeutic protein) and the valency of the corresponding antibody.

[0184] The invention also provides antibodies that competitively inhibit binding of an antibody to an epitope of a Therapeutic protein as determined by any method known in the art for determining competitive binding, for example, the immunoassays described herein. In preferred embodiments, the antibody competitively inhibits binding to the epitope by at least 95%, at least 90%, at least 85%, at least 80%, at least 75%, at least 70%, at least 60%, or at least 50%. In preferred embodiments, albumin fusion proteins comprising at least a fragment or variant of an antibody that binds a Therapeutic protein, competitively inhibits binding of a second antibody to an epitope of a Therapeutic protein. In other preferred embodiments, albumin fusion proteins comprising at least a fragment or variant of an antibody that binds a Therapeutic protein, competitively inhibits binding of a second antibody to an epitope of a Therapeutic protein by at least 95%, at least 90%, at least 85%, at least 80%, at least 75%, at least 70%, at least 60%, or at least 50%.

[0185] Antibodies that bind to a Therapeutic protein and that may correspond to a Therapeutic protein portion of an albumin fusion protein of the invention may act as agonists or antagonists of the Therapeutic protein. For example, the present invention includes antibodies which disrupt the receptor/ligand interactions with the polypeptides of the invention either partially or fully. The invention features both receptor-specific antibodies and ligand-specific antibodies. The invention also features receptor-specific antibodies which do not prevent ligand binding but prevent receptor activation. Receptor activation (i.e., signaling) may be determined by techniques described herein or otherwise known in the art. For example, receptor activation can be determined by detecting the phosphorylation (e.g., tyrosine or serine/threonine) of the receptor or its substrate by immunoprecipitation followed by western blot analysis (for example, as described supra). In specific embodiments, antibodies are provided that inhibit ligand activity or receptor activity by at least 95%, at least 90%, at least 85%, at least 80%, at least 75%, at least 70%, at least 60%, or at least 50% of the activity in absence of the antibody. In preferred embodiments, albumin fusion proteins comprising at least a fragment or variant of an antibody that binds a Therapeutic protein, has similar or substantially similar characteristics with regard to preventing ligand binding and/or preventing receptor activation compared to an un-fused fragment or variant of the antibody that binds the Therapeutic protein.

[0186] The invention also features receptor-specific antibodies which both prevent ligand binding and receptor activation as well as antibodies that recognize the receptor-ligand complex, and, preferably, do not specifically recognize the unbound receptor or the unbound ligand. Likewise, included in the invention are neutralizing antibodies which bind the ligand and prevent binding of the ligand to the receptor, as well as antibodies which bind the ligand, thereby preventing receptor activation, but do not prevent the ligand from binding the receptor. Further included in the invention are antibodies which activate the receptor. These antibodies may act as receptor agonists, i.e., potentiate or activate either all or a subset of the biological activities of the ligand-mediated receptor activation, for example, by inducing dimerization of the receptor. The antibodies may be specified as agonists, antagonists or inverse agonists for biological activities comprising the specific biological activities of the Therapeutic proteins (e.g. as disclosed in Table 1). The above antibody agonists can be made using methods known in the art. See, e.g., PCT publication WO 96/40281; U.S. Pat. No. 5,811,097; Deng et al., Blood 92(6):1981-1988 (1998); Chen et al., Cancer Res. 58(16):3668-3678 (1998); Harrop et al., J. Immunol. 161(4):1786-1794 (1998); Zhu et al., Cancer Res. 58(15):3209-3214 (1998); Yoon et al., J. Immunol. 160(7):3170-3179 (1998); Prat et al., J. Cell. Sci. 111(Pt2):237-247 (1998); Pitard et al., J. Immunol. Methods 205(2):177-190 (1997); Liautard et al., Cytokine 9(4):233-241 (1997); Carlson et al., J. Biol. Chem. 272(17): 11295-11301 (1997); Taryman et al., Neuron 14(4):755-762 (1995); Muller et al., Structure 6(9):1153-1167 (1998); Bartunek et al., Cytokine 8(1):14-20 (1996) (which are all incorporated by reference herein in their entireties). In preferred embodiments, albumin fusion proteins comprising at least a fragment or variant of an antibody that binds a Therapeutic protein, have similar or substantially identical agonist or antagonist properties as an un-fused fragment or variant of the antibody that binds the Therapeutic protein.

[0187] Antibodies that bind to a Therapeutic protein and that may correspond to a Therapeutic protein portion of an albumin fusion protein of the invention may be used, for example, to purify, detect, and target Therapeutic proteins, including both in in vitro and in vivo diagnostic and therapeutic methods. For example, the antibodies have utility in immunoassays for qualitatively and quantitatively measuring levels of the Therapeutic protein in biological samples. See, e.g., Harlow et al., Antibodies: A Laboratory Manual, (Cold Spring Harbor Laboratory Press, 2nd ed. 1988); incorporated by reference herein in its entirety. Likewise, albumin fusion proteins comprising at least a fragment or variant of an antibody that binds a Therapeutic protein, may be used, for example, to purify, detect, and target Therapeutic proteins, including both in vitro and in vivo diagnostic and therapeutic methods.

[0188] Antibodies that bind to a Therapeutic protein and that may correspond to a Therapeutic protein portion of an albumin fusion protein include derivatives that are modified, i.e., by the covalent attachment of any type of molecule to the antibody. For example, but not by way of limitation, the antibody derivatives include antibodies that have been modified, e.g., by glycosylation, acetylation, pegylation, phosphorylation, amidation, derivatization by known protecting/blocking groups, proteolytic cleavage, linkage to a cellular ligand or other protein, etc. Any of numerous chemical modifications may be carried out by known techniques, including, but not limited to specific chemical cleavage, acetylation, formylation, metabolic synthesis of tunicamycin, etc. Additionally, the derivative may contain one or more non-classical amino acids. Albumin fusion proteins of the invention may also be modified as described above.

[0189] Methods of Producing Antibodies that Bind Therapeutic Proteins

[0190] The antibodies that bind to a Therapeutic protein and that may correspond to a Therapeutic protein portion of an albumin fusion protein of the invention may be generated by any suitable method known in the art. Polyclonal antibodies to an antigen-of-interest can be produced by various procedures well known in the art. For example, a Therapeutic protein may be administered to various host animals including, but not limited to, rabbits, mice, rats, etc. to induce the production of sera containing polyclonal antibodies specific for the antigen. Various adjuvants may be used to increase the immunological response, depending on the host species, and include but are not limited to, Freund's (complete and incomplete), mineral gels such as aluminum hydroxide, surface active substances such as lysolecithin, pluronic polyols, polyanions, peptides, oil emulsions, keyhole limpet hemocyanins, dinitrophenol, and potentially useful human adjuvants such as BCG (bacille Calmette-Guerin) and corynebacterium parvum. Such adjuvants are also well known in the art.

[0191] Monoclonal antibodies can be prepared using a wide variety of techniques known in the art including the use of hybridoma, recombinant, and phage display technologies, or a combination thereof. For example, monoclonal antibodies can be produced using hybridoma techniques including those known in the art and taught, for example, in Harlow et al., Antibodies: A Laboratory Manual, (Cold Spring Harbor Laboratory Press, 2nd ed. 1988); Hammerling, et al., in: Monoclonal Antibodies and T-Cell Hybridomas 563-681 (Elsevier, N.Y., 1981) (said references incorporated by reference in their entireties). The term “monoclonal antibody” as used herein is not limited to antibodies produced through hybridoma technology. The term “monoclonal antibody” refers to an antibody that is derived from a single clone, including any eukaryotic, prokaryotic, or phage clone, and not the method by which it is produced.

[0192] Methods for producing and screening for specific antibodies using hybridoma technology are routine and well known in the art. In a non-limiting example, mice can be immunized with a Therapeutic protein or fragment or variant thereof, an albumin fusion protein, or a cell expressing such a Therapeutic protein or fragment or variant thereof or albumin fusion protein. Once an immune response is detected, e.g., antibodies specific for the antigen are detected in the mouse serum, the mouse spleen is harvested and splenocytes isolated. The splenocytes are then fused by well known techniques to any suitable myeloma cells, for example cells from cell line SP20 available from the ATCC. Hybridomas are selected and cloned by limited dilution. The hybridoma clones are then assayed by methods known in the art for cells that secrete antibodies capable of binding a polypeptide of the invention. Ascites fluid, which generally contains high levels of antibodies, can be generated by immunizing mice with positive hybridoma clones.

[0193] Accordingly, the present invention provides methods of generating monoclonal antibodies as well as antibodies produced by the method comprising culturing a hybridoma cell secreting an antibody wherein, preferably, the hybridoma is generated by fusing splenocytes isolated from a mouse immunized with an antigen of the invention with myeloma cells and then screening the hybridomas resulting from the fusion for hybridoma clones that secrete an antibody able to bind a polypeptide of the invention.

[0194] Another well known method for producing both polyclonal and monoclonal human B cell lines is transformation using Epstein Barr Virus (EBV). Protocols for generating EBV-transformed B cell lines are commonly known in the art, such as, for example, the protocol outlined in Chapter 7.22 of Current Protocols in Immunology, Coligan et al., Eds., 1994, John Wiley & Sons, NY, which is hereby incorporated in its entirety by reference. The source of B cells for transformation is commonly human peripheral blood, but B cells for transformation may also be derived from other sources including, but not limited to, lymph nodes, tonsil, spleen, tumor tissue, and infected tissues. Tissues are generally made into single cell suspensions prior to EBV transformation. Additionally, steps may be taken to either physically remove or inactivate T cells (e.g., by treatment with cyclosporin A) in B cell-containing samples, because T cells from individuals seropositive for anti-EBV antibodies can suppress B cell immortalization by EBV.

[0195] In general, the sample containing human B cells is innoculated with EBV, and cultured for 3-4 weeks. A typical source of EBV is the culture supernatant of the B95-8 cell line (ATCC #VR-1492). Physical signs of EBV transformation can generally be seen towards the end of the 3-4 week culture period. By phase-contrast microscopy, transformed cells may appear large, clear, hairy and tend to aggregate in tight clusters of cells. Initially, EBV lines are generally polyclonal. However, over prolonged periods of cell cultures, EBV lines may become monoclonal or polyclonal as a result of the selective outgrowth of particular B cell clones. Alternatively, polyclonal EBV transformed lines may be subcloned (e.g., by limiting dilution culture) or fused with a suitable fusion partner and plated at limiting dilution to obtain monoclonal B cell lines. Suitable fusion partners for EBV transformed cell lines include mouse myeloma cell lines (e.g., SP2/0, X63-Ag8.653), heteromyeloma cell lines (human×mouse; e.g, SPAM-8, SBC-H20, and CB-F7), and human cell lines (e.g., GM 1500, SKO-007, RPMI 8226, and KR-4). Thus, the present invention also provides a method of generating polyclonal or monoclonal human antibodies against polypeptides of the invention or fragments thereof, comprising EBV-transformation of human B cells.

[0196] Antibody fragments which recognize specific epitopes may be generated by known techniques. For example, Fab and F(ab′)2 fragments of the invention may be produced by proteolytic cleavage of immunoglobulin molecules, using enzymes such as papain (to produce Fab fragments) or pepsin (to produce F(ab′)2 fragments). F(ab′)2 fragments contain the variable region, the light chain constant region and the CH1 domain of the heavy chain.

[0197] For example, antibodies that bind to a Therapeutic protein can also be generated using various phage display methods known in the art. In phage display methods, functional antibody domains are displayed on the surface of phage particles which carry the polynucleotide sequences encoding them. In a particular embodiment, such phage can be utilized to display antigen binding domains expressed from a repertoire or combinatorial antibody library (e.g., human or murine). Phage expressing an antigen binding domain that binds the antigen of interest can be selected or identified with antigen, e.g., using labeled antigen or antigen bound or captured to a solid surface or bead. Phage used in these methods are typically filamentous phage including fd and M13 binding domains expressed from phage with Fab, Fv or disulfide stabilized Fv antibody domains recombinantly fused to either the phage gene III or gene VIII protein. Examples of phage display methods that can be used to make antibodies that bind to a Therapeutic protein include those disclosed in Brinkman et al., J. Immunol. Methods 182:41-50 (1995); Ames et al., J. Immunol. Methods 184:177-186 (1995); Kettleborough et al., Eur. J. Immunol. 24:952-958 (1994); Persic et al., Gene 187 9-18 (1997); Burton et al., Advances in Immunology 57:191-280 (1994); PCT application No. PCT/GB91/01134; PCT publications WO 90/02809; WO 91/10737; WO 92/01047; WO 92/18619; WO 93/11236; WO 95/15982; WO 95/20401; and U.S. Pat. Nos. 5,698,426; 5,223,409; 5,403,484; 5,580,717; 5,427,908; 5,750,753; 5,821,047; 5,571,698; 5,427,908; 5,516,637; 5,780,225; 5,658,727; 5,733,743 and 5,969,108; each of which is incorporated herein by reference in its entirety.

[0198] As described in the above references, after phage selection, the antibody coding regions from the phage can be isolated and used to generate whole antibodies, including human antibodies, or any other desired antigen binding fragment, and expressed in any desired host, including mammalian cells, insect cells, plant cells, yeast, and bacteria, e.g., as described in detail below. For example, techniques to recombinantly produce Fab, Fab′ and F(ab′)2 fragments can also be employed using methods known in the art such as those disclosed in PCT publication WO 92/22324; Mullinax et al., BioTechniques 12(6):864-869 (1992); and Sawai et al., AJRI 34:26-34 (1995); and Better et al., Science 240:1041-1043 (1988) (said references incorporated by reference in their entireties).

[0199] Examples of techniques which can be used to produce single-chain Fvs and antibodies include those described in U.S. Pat. Nos. 4,946,778 and 5,258,498; Huston et al., Methods in Enzymology 203:46-88 (1991); Shu et al., PNAS 90:7995-7999 (1993); and Skerra et al., Science 240:1038-1040 (1988). For some uses, including in vivo use of antibodies in humans and in vitro detection assays, it may be preferable to use chimeric, humanized, or human antibodies. A chimeric antibody is a molecule in which different portions of the antibody are derived from different animal species, such as antibodies having a variable region derived from a murine monoclonal antibody and a human immunoglobulin constant region. Methods for producing chimeric antibodies are known in the art. See e.g., Morrison, Science 229:1202 (1985); Oi et al., BioTechniques 4:214 (1986); Gillies et al., (1989) J. Immunol. Methods 125:191-202; U.S. Pat. Nos. 5,807,715; 4,816,567; and 4,816,397, which are incorporated herein by reference in their entirety. Humanized antibodies are antibody molecules from non-human species antibody that binds the desired antigen having one or more complementarity determining regions (CDRs) from the non-human species and a framework regions from a human immunoglobulin molecule. Often, framework residues in the human framework regions will be substituted with the corresponding residue from the CDR donor antibody to alter, preferably improve, antigen binding. These framework substitutions are identified by methods well known in the art, e.g., by modeling of the interactions of the CDR and framework residues to identify framework residues important for antigen binding and sequence comparison to identify unusual framework residues at particular positions. (See, e.g., Queen et al., U.S. Pat. No. 5,585,089; Riechmann et al., Nature 332:323 (1988), which are incorporated herein by reference in their entireties.) Antibodies can be humanized using a variety of techniques known in the art including, for example, CDR-grafting (EP 239,400; PCT publication WO 91/09967; U.S. Pat. Nos. 5,225,539; 5,530,101; and 5,585,089), veneering or resurfacing (EP 592,106; EP 519,596; Padlan, Molecular Immunology 28(4/5):489-498 (1991); Studnicka et al., Protein Engineering 7(6):805-814 (1994); Roguska. et al., PNAS 91:969-973 (1994)), and chain shuffling (U.S. Pat. No. 5,565,332).

[0200] Completely human antibodies are particularly desirable for therapeutic treatment of human patients. Human antibodies can be made by a variety of methods known in the art including phage display methods described above using antibody libraries derived from human immunoglobulin sequences. See also, U.S. Pat. Nos. 4,444,887 and 4,716,111; and PCT publications WO 98/46645, WO 98/50433, WO 98/24893, WO 98/16654, WO 96/34096, WO 96/33735, and WO 91/10741; each of which is incorporated herein by reference in its entirety.

[0201] Human antibodies can also be produced using transgenic mice which are incapable of expressing functional endogenous immunoglobulins, but which can express human immunoglobulin genes. For example, the human heavy and light chain immunoglobulin gene complexes may be introduced randomly or by homologous recombination into mouse embryonic stem cells. Alternatively, the human variable region, constant region, and diversity region may be introduced into mouse embryonic stem cells in addition to the human heavy and light chain genes. The mouse heavy and light chain immunoglobulin genes may be rendered non-functional separately or simultaneously with the introduction of human immunoglobulin loci by homologous recombination. In particular, homozygous deletion of the JH region prevents endogenous antibody production. The modified embryonic stem cells are expanded and microinjected into blastocysts to produce chimeric mice. The chimeric mice are then bred to produce homozygous offspring which express human antibodies. The transgenic mice are immunized in the normal fashion with a selected antigen, e.g., all or a portion of a polypeptide of the invention. Monoclonal antibodies directed against the antigen can be obtained from the immunized, transgenic mice using conventional hybridoma technology. The human immunoglobulin transgenes harbored by the transgenic mice rearrange during B cell differentiation, and subsequently undergo class switching and somatic mutation. Thus, using such a technique, it is possible to produce therapeutically useful IgG, IgA, IgM and IgE antibodies. For an overview of this technology for producing human antibodies, see Lonberg and Huszar, Int. Rev. Immunol. 13:65-93 (1995). For a detailed discussion of this technology for producing human antibodies and human monoclonal antibodies and protocols for producing such antibodies, see, e.g., PCT publications WO 98/24893; WO 92/01047; WO 96/34096; WO 96/33735; European Patent No. 0 598 877; U.S. Pat. Nos. 5,413,923; 5,625,126; 5,633,425; 5,569,825; 5,661,016; 5,545,806; 5,814,318; 5,885,793; 5,916,771; 5,939,598; 6,075,181; and 6,114,598, which are incorporated by reference herein in their entirety. In addition, companies such as Abgenix, Inc. (Freemont, Calif.) and Genpharm (San Jose, Calif.) can be engaged to provide human antibodies directed against a selected antigen using technology similar to that described above.

[0202] Completely human antibodies which recognize a selected epitope can be generated using a technique referred to as “guided selection.” In this approach a selected non-human monoclonal antibody, e.g., a mouse antibody, is used to guide the selection of a completely human antibody recognizing the same epitope. (Jespers et al., Bio/technology 12:899-903 (1988)).

[0203] Polynucleotides Encoding Antibodies

[0204] The invention further provides polynucleotides comprising a nucleotide sequence encoding an antibody and fragments thereof. The invention also encompasses polynucleotides that hybridize under stringent or alternatively, under lower stringency hybridization conditions, e.g., as defined supra, to polynucleotides that encode an antibody, preferably, that specifically binds to a Therapeutic protein, and more preferably, an antibody that binds to a polypeptide having the amino acid sequence of a “Therapeutic protein:X” as disclosed in the “SEQ ID NO:Z” column of Table 2.

[0205] The polynucleotides may be obtained, and the nucleotide sequence of the polynucleotides determined, by any method known in the art. For example, if the nucleotide sequence of the antibody is known, a polynucleotide encoding the antibody may be assembled from chemically synthesized oligonucleotides (e.g., as described in Kutmeier et al., BioTechniques 17:242 (1994)), which, briefly, involves the synthesis of overlapping oligonucleotides containing portions of the sequence encoding the antibody, annealing and ligating of those oligonucleotides, and then amplification of the ligated oligonucleotides by PCR.

[0206] Alternatively, a polynucleotide encoding an antibody may be generated from nucleic acid from a suitable source. If a clone containing a nucleic acid encoding a particular antibody is not available, but the sequence of the antibody molecule is known, a nucleic acid encoding the immunoglobulin may be chemically synthesized or obtained from a suitable source (e.g., an antibody cDNA library, or a cDNA library generated from, or nucleic acid, preferably poly A+ RNA, isolated from, any tissue or cells expressing the antibody, such as hybridoma cells selected to express an antibody) by PCR amplification using synthetic primers hybridizable to the 3′ and 5′ ends of the sequence or by cloning using an oligonucleotide probe specific for the particular gene sequence to identify, e.g., a cDNA clone from a cDNA library that encodes the antibody. Amplified nucleic acids generated by PCR may then be cloned into replicable cloning vectors using any method well known in the art (See Example 65).

[0207] Once the nucleotide sequence and corresponding amino acid sequence of the antibody is determined, the nucleotide sequence of the antibody may be manipulated using methods well known in the art for the manipulation of nucleotide sequences, e.g., recombinant DNA techniques, site directed mutagenesis, PCR, etc. (see, for example, the techniques described in Sambrook et al., 1990, Molecular Cloning, A Laboratory Manual, 2d Ed., Cold Spring Harbor Laboratory, Cold Spring Harbor, N.Y. and Ausubel et al., eds., 1998, Current Protocols in Molecular Biology, John Wiley & Sons, NY, which are both incorporated by reference herein in their entireties), to generate antibodies having a different amino acid sequence, for example to create amino acid substitutions, deletions, and/or insertions.

[0208] In a specific embodiment, the amino acid sequence of the heavy and/or light chain variable domains may be inspected to identify the sequences of the complementarity determining regions (CDRs) by methods that are well know in the art, e.g., by comparison to known amino acid sequences of other heavy and light chain variable regions to determine the regions of sequence hypervariability. Using routine recombinant DNA techniques, one or more of the CDRs may be inserted within framework regions, e.g., into human framework regions to humanize a non-human antibody, as described supra. The framework regions may be naturally occurring or consensus framework regions, and preferably human framework regions (see, e.g., Chothia et al., J. Mol. Biol. 278: 457-479 (1998) for a listing of human framework regions). Preferably, the polynucleotide generated by the combination of the framework regions and CDRs encodes an antibody that specifically binds a polypeptide of the invention. Preferably, as discussed supra, one or more amino acid substitutions may be made within the framework regions, and, preferably, the amino acid substitutions improve binding of the antibody to its antigen. Additionally, such methods may be used to make amino acid substitutions or deletions of one or more variable region cysteine residues participating in an intrachain disulfide bond to generate antibody molecules lacking one or more intrachain disulfide bonds. Other alterations to the polynucleotide are encompassed by the present invention and within the skill of the art.

[0209] In addition, techniques developed for the production of “chimeric antibodies” (Morrison et al., Proc. Natl. Acad. Sci. 81:851-855 (1984); Neuberger et al., Nature 312:604-608 (1984); Takeda et al., Nature 314:452-454 (1985)) by splicing genes from a mouse antibody molecule of appropriate antigen specificity together with genes from a human antibody molecule of appropriate biological activity can be used. As described supra, a chimeric antibody is a molecule in which different portions are derived from different animal species, such as those having a variable region derived from a murine mAb and a human immunoglobulin constant region, e.g., humanized antibodies.

[0210] Alternatively, techniques described for the production of single chain antibodies (U.S. Pat. No. 4,946,778; Bird, Science 242:423-42 (1988); Huston et al., Proc. Natl. Acad. Sci. USA 85:5879-5883 (1988); and Ward et al., Nature 334:544-54 (1989)) can be adapted to produce single chain antibodies. Single chain antibodies are formed by linking the heavy and light chain fragments of the Fv region via an amino acid bridge, resulting in a single chain polypeptide. Techniques for the assembly of functional Fv fragments in E. coli may also be used (Skerra et al., Science 242:1038-1041 (1988)).

[0211] Recombinant Expression of Antibodies

[0212] Recombinant expression of an antibody, or fragment, derivative or analog thereof, (e.g., a heavy or light chain of an antibody or a single chain antibody), requires construction of an expression vector containing a polynucleotide that encodes the antibody. Once a polynucleotide encoding an antibody molecule or a heavy or light chain of an antibody, or portion thereof (preferably containing the heavy or light chain variable domain), of the invention has been obtained, the vector for the production of the antibody molecule may be produced by recombinant DNA technology using techniques well known in the art. Thus, methods for preparing a protein by expressing a polynucleotide containing an antibody encoding nucleotide sequence are described herein. Methods which are well known to those skilled in the art can be used to construct expression vectors containing antibody coding sequences and appropriate transcriptional and translational control signals. These methods include, for example, in vitro recombinant DNA techniques, synthetic techniques, and in vivo genetic recombination. The invention, thus, provides replicable vectors comprising a nucleotide sequence encoding an antibody molecule of the invention, or a heavy or light chain thereof, or a heavy or light chain variable domain, operably linked to a promoter. Such vectors may include the nucleotide sequence encoding the constant region of the antibody molecule (see, e.g., PCT Publication WO 86/05807; PCT Publication WO 89/01036; and U.S. Pat. No. 5,122,464) and the variable domain of the antibody may be cloned into such a vector for expression of the entire heavy or light chain.

[0213] The expression vector is transferred to a host cell by conventional techniques and the transfected cells are then cultured by conventional techniques to produce an antibody. Thus, the invention includes host cells containing a polynucleotide encoding an antibody of the invention, or a heavy or light chain thereof, or a single chain antibody, operably linked to a heterologous promoter. In preferred embodiments for the expression of double-chained antibodies, vectors encoding both the heavy and light chains may be co-expressed in the host cell for expression of the entire immunoglobulin molecule, as detailed below.

[0214] A variety of host-expression vector systems may be utilized to express the antibody molecules of the invention. Such host-expression systems represent vehicles by which the coding sequences of interest may be produced and subsequently purified, but also represent cells which may, when transformed or transfected with the appropriate nucleotide coding sequences, express an antibody molecule of the invention in situ. These include but are not limited to microorganisms such as bacteria (e.g., E. coli, B. subtilis) transformed with recombinant bacteriophage DNA, plasmid DNA or cosmid DNA expression vectors containing antibody coding sequences; yeast (e.g., Saccharomyces, Pichia) transformed with recombinant yeast expression vectors containing antibody coding sequences; insect cell systems infected with recombinant virus expression vectors (e.g., baculovirus) containing antibody coding sequences; plant cell systems infected with recombinant virus expression vectors (e.g., cauliflower mosaic virus, CaMV; tobacco mosaic virus, TMV) or transformed with recombinant plasmid expression vectors (e.g., Ti plasmid) containing antibody coding sequences; or mammalian cell systems (e.g., COS, CHO, BHK, 293, 3T3 cells) harboring recombinant expression constructs containing promoters derived from the genome of mammalian cells (e.g., metallothionein promoter) or from mammalian viruses (e.g., the adenovirus late promoter; the vaccinia virus 7.5 K promoter). Preferably, bacterial cells such as Escherichia coli, and more preferably, eukaryotic cells, especially for the expression of whole recombinant antibody molecule, are used for the expression of a recombinant antibody molecule. For example, mammalian cells such as Chinese hamster ovary cells (CHO), in conjunction with a vector such as the major intermediate early gene promoter element from human cytomegalovirus is an effective expression system for antibodies (Foecking et al., Gene 45:101 (1986); Cockett et al., Bio/Technology 8:2 (1990)).

[0215] In bacterial systems, a number of expression vectors may be advantageously selected depending upon the use intended for the antibody molecule being expressed. For example, when a large quantity of such a protein is to be produced, for the generation of pharmaceutical compositions of an antibody molecule, vectors which direct the expression of high levels of fusion protein products that are readily purified may be desirable. Such vectors include, but are not limited, to the E. coli expression vector pUR278 (Ruther et al., EMBO J. 2:1791 (1983)), in which the antibody coding sequence may be ligated individually into the vector in frame with the lac Z coding region so that a fusion protein is produced; pIN vectors (Inouye & Inouye, Nucleic Acids Res. 13:3101-3109 (1985); Van Heeke & Schuster, J. Biol. Chem. 24:5503-5509 (1989)); and the like. pGEX vectors may also be used to express foreign polypeptides as fusion proteins with glutathione S-transferase (GST). In general, such fusion proteins are soluble and can easily be purified from lysed cells by adsorption and binding to matrix glutathione-agarose beads followed by elution in the presence of free glutathione. The pGEX vectors are designed to include thrombin or factor Xa protease cleavage sites so that the cloned target gene product can be released from the GST moiety.

[0216] In an insect system, Autographa californica nuclear polyhedrosis virus (AcNPV) is used as a vector to express foreign genes. The virus grows in Spodoptera frugiperda cells. The antibody coding sequence may be cloned individually into non-essential regions (for example the polyhedrin gene) of the virus and placed under control of an AcNPV promoter (for example the polyhedrin promoter).

[0217] In mammalian host cells, a number of viral-based expression systems may be utilized. In cases where an adenovirus is used as an expression vector, the antibody coding sequence of interest may be ligated to an adenovirus transcription/translation control complex, e.g., the late promoter and tripartite leader sequence. This chimeric gene may then be inserted in the adenovirus genome by in vitro or in vivo recombination. Insertion in a non-essential region of the viral genome (e.g., region E1 or E3) will result in a recombinant virus that is viable and capable of expressing the antibody molecule in infected hosts. (e.g., see Logan & Shenk, Proc. Natl. Acad. Sci. USA 81:355-359 (1984)). Specific initiation signals may also be required for efficient translation of inserted antibody coding sequences. These signals include the ATG initiation codon and adjacent sequences. Furthermore, the initiation codon must be in phase with the reading frame of the desired coding sequence to ensure translation of the entire insert. These exogenous translational control signals and initiation codons can be of a variety of origins, both natural and synthetic. The efficiency of expression may be enhanced by the inclusion of appropriate transcription enhancer elements, transcription terminators, etc. (see Bittner et al., Methods in Enzymol. 153:51-544 (1987)).

[0218] In addition, a host cell strain may be chosen which modulates the expression of the inserted sequences, or modifies and processes the gene product in the specific fashion desired. Such modifications (e.g., glycosylation) and processing (e.g., cleavage) of protein products may be important for the function of the protein. Different host cells have characteristic and specific mechanisms for the post-translational processing and modification of proteins and gene products. Appropriate cell lines or host systems can be chosen to ensure the correct modification and processing of the foreign protein expressed. To this end, eukaryotic host cells which possess the cellular machinery for proper processing of the primary transcript, glycosylation, and phosphorylation of the gene product may be used. Such mammalian host cells include but are not limited to CHO, VERY, BHK, Hela, COS, MDCK, 293, 3T3, W138, and in particular, breast cancer cell lines such as, for example, BT483, Hs578T, HTB2, BT20 and T47D, and normal mammary gland cell line such as, for example, CRL7030 and Hs578Bst.

[0219] For long-term, high-yield production of recombinant proteins, stable expression is preferred. For example, cell lines which stably express the antibody molecule may be engineered. Rather than using expression vectors which contain viral origins of replication, host cells can be transformed with DNA controlled by appropriate expression control elements (e.g., promoter, enhancer, sequences, transcription terminators, polyadenylation sites, etc.), and a selectable marker. Following the introduction of the foreign DNA, engineered cells may be allowed to grow for 1-2 days in an enriched media, and then are switched to a selective media. The selectable marker in the recombinant plasmid confers resistance to the selection and allows cells to stably integrate the plasmid into their chromosomes and grow to form foci which in turn can be cloned and expanded into cell lines. This method may advantageously be used to engineer cell lines which express the antibody molecule. Such engineered cell lines may be particularly useful in screening and evaluation of compounds that interact directly or indirectly with the antibody molecule.

[0220] A number of selection systems may be used, including but not limited to the herpes simplex virus thymidine kinase (Wigler et al., Cell 11:223 (1977)), hypoxanthine-guanine phosphoribosyltransferase (Szybalska & Szybalski, Proc. Natl. Acad. Sci. USA 48:202 (1992)), and adenine phosphoribosyltransferase (Lowy et al., Cell 22:817 (1980)) genes can be employed in tk-, hgprt- or aprt-cells, respectively. Also, antimetabolite resistance can be used as the basis of selection for the following genes: dhfr, which confers resistance to methotrexate (Wigler et al., Natl. Acad. Sci. USA 77:357 (1980); O'Hare et al., Proc. Natl. Acad. Sci. USA 78:1527 (1981)); gpt, which confers resistance to mycophenolic acid (Mulligan & Berg, Proc. Natl. Acad. Sci. USA 78:2072 (1981)); neo, which confers resistance to the aminoglycoside G-418 Clinical Pharmacy 12:488-505; Wu and Wu, Biotherapy 3:87-95 (1991); Tolstoshev, Ann. Rev. Pharmacol. Toxicol. 32:573-596 (1993); Mulligan, Science 260:926-932 (1993); and Morgan and Anderson, Ann. Rev. Biochem. 62:191-217 (1993); May, 1993, TIB TECH 11(5):155-215 (1993)); and hygro, which confers resistance to hygromycin (Santerre et al., Gene 30:147 (1984)). Methods commonly known in the art of recombinant DNA technology may be routinely applied to select the desired recombinant clone, and such methods are described, for example, in Ausubel et al. (eds.), Current Protocols in Molecular Biology, John Wiley & Sons, NY (1993); Kriegler, Gene Transfer and Expression, A Laboratory Manual, Stockton Press, NY (1990); and in Chapters 12 and 13, Dracopoli et al. (eds), Current Protocols in Human Genetics, John Wiley & Sons, NY (1994); Colberre-Garapin et al., J. Mol. Biol. 150:1 (1981), which are incorporated by reference herein in their entireties.

[0221] The expression levels of an antibody molecule can be increased by vector amplification (for a review, see Bebbington and Hentschel, The use of vectors based on gene amplification for the expression of cloned genes in mammalian cells in DNA cloning, Vol. 3. (Academic Press, New York, 1987)). When a marker in the vector system expressing antibody is amplifiable, increase in the level of inhibitor present in culture of host cell will increase the number of copies of the marker gene. Since the amplified region is associated with the antibody gene, production of the antibody will also increase (Crouse et al., Mol. Cell. Biol. 3:257 (1983)).

[0222] Vectors which use glutamine synthase (GS) or DHFR as the selectable markers can be amplified in the presence of the drugs methionine sulphoximine or methotrexate, respectively. An advantage of glutamine synthase based vectors are the availability of cell lines (e.g., the murine myeloma cell line, NS0) which are glutamine synthase negative. Glutamine synthase expression systems can also function in glutamine synthase expressing cells (e.g. Chinese Hamster Ovary (CHO) cells) by providing additional inhibitor to prevent the functioning of the endogenous gene. A glutamine synthase expression system and components thereof are detailed in PCT publications: WO87/04462; WO86/05807; WO89/01036; WO89/10404; and WO91/06657 which are incorporated in their entireties by reference herein. Additionally, glutamine synthase expression vectors that may be used according to the present invention are commercially available from suppliers, including, for example Lonza Biologics, Inc. (Portsmouth, N.H.). Expression and production of monoclonal antibodies using a GS expression system in murine myeloma cells is described in Bebbington et al., Bio/technology 10: 169 (1992) and in Biblia and Robinson Biotechnol. Prog. 11:1 (1995) which are incorporated in their entireties by reference herein.

[0223] The host cell may be co-transfected with two expression vectors of the invention, the first vector encoding a heavy chain derived polypeptide and the second vector encoding a light chain derived polypeptide. The two vectors may contain identical selectable markers which enable equal expression of heavy and light chain polypeptides. Alternatively, a single vector may be used which encodes, and is capable of expressing, both heavy and light chain polypeptides. In such situations, the light chain should be placed before the heavy chain to avoid an excess of toxic free heavy chain (Proudfoot, Nature 322:52 (1986); Kohler, Proc. Natl. Acad. Sci. USA 77:2197 (1980)). The coding sequences for the heavy and light chains may comprise cDNA or genomic DNA.

[0224] Once an antibody molecule of the invention has been produced by an animal, chemically synthesized, or recombinantly expressed, it may be purified by any method known in the art for purification of an immunoglobulin molecule, for example, by chromatography (e.g., ion exchange, affinity, particularly by affinity for the specific antigen after Protein A, and sizing column chromatography), centrifugation, differential solubility, or by any other standard technique for the purification of proteins. In addition, the antibodies that bind to a Therapeutic protein and that may correspond to a Therapeutic protein portion of an albumin fusion protein of the invention or fragments thereof can be fused to heterologous polypeptide sequences described herein or otherwise known in the art, to facilitate purification.

[0225] Modifications of Antibodies

[0226] Antibodies that bind a Therapeutic protein or fragments or variants can be fused to marker sequences, such as a peptide to facilitate purification. In preferred embodiments, the marker amino acid sequence is a hexa-histidine peptide, such as the tag provided in a pQE vector (QIAGEN, Inc., 9259 Eton Avenue, Chatsworth, Calif., 91311), among others, many of which are commercially available. As described in Gentz et al., Proc. Natl. Acad. Sci. USA 86:821-824 (1989), for instance, hexa-histidine provides for convenient purification of the fusion protein. Other peptide tags useful for purification include, but are not limited to, the hemagglutinin tag (also called the “HA tag”), which corresponds to an epitope derived from the influenza hemagglutinin protein (Wilson et al., Cell 37:767 (1984)) and the “flag” tag.

[0227] The present invention further encompasses antibodies or fragments thereof conjugated to a diagnostic or therapeutic agent. The antibodies can be used diagnostically to, for example, monitor the development or progression of a tumor as part of a clinical testing procedure to, e.g., determine the efficacy of a given treatment regimen. Detection can be facilitated by coupling the antibody to a detectable substance. Examples of detectable substances include various enzymes, prosthetic groups, fluorescent materials, luminescent materials, bioluminescent materials, radioactive materials, positron emitting metals using various positron emission tomographies, and nonradioactive paramagnetic metal ions. The detectable substance may be coupled or conjugated either directly to the antibody (or fragment thereof) or indirectly, through an intermediate (such as, for example, a linker known in the art) using techniques known in the art. See, for example, U.S. Pat. No. 4,741,900 for metal ions which can be conjugated to antibodies for use as diagnostics according to the present invention. Examples of suitable enzymes include horseradish peroxidase, alkaline phosphatase, beta-galactosidase, or acetylcholinesterase; examples of suitable prosthetic group complexes include streptavidin/biotin and avidin/biotin; examples of suitable fluorescent materials include umbelliferone, fluorescein, fluorescein isothiocyanate, rhodamine, dichlorotriazinylamine fluorescein, dansyl chloride or phycoerythrin; an example of a luminescent material includes luminol; examples of bioluminescent materials include luciferase, luciferin, and aequorin; and examples of suitable radioactive material include 125I, 131I, 111In or 99Tc. Other examples of detectable substances have been described elsewhere herein.

[0228] Further, an antibody of the invention may be conjugated to a therapeutic moiety such as a cytotoxin, e.g., a cytostatic or cytocidal agent, a therapeutic agent or a radioactive metal ion, e.g., alpha-emitters such as, for example, 213Bi. A cytotoxin or cytotoxic agent includes any agent that is detrimental to cells. Examples include paclitaxol, cytochalasin B, gramicidin D, ethidium bromide, emetine, mitomycin, etoposide, tenoposide, vincristine, vinblastine, colchicin, doxorubicin, daunorubicin, dihydroxy anthracin dione, mitoxantrone, mithramycin, actinomycin D, 1-dehydrotestosterone, glucocorticoids, procaine, tetracaine, lidocaine, propranolol, and puromycin and analogs or homologs thereof. Therapeutic agents include, but are not limited to, antimetabolites (e.g., methotrexate, 6-mercaptopurine, 6-thioguanine, cytarabine, 5-fluorouracil decarbazine), alkylating agents (e.g., mechlorethamine, thioepa chlorambucil, melphalan, carmustine (BSNU) and lomustine (CCNU), cyclothosphamide, busulfan, dibromomannitol, streptozotocin, mitomycin C, and cis-dichlorodiamine platinum (II) (DDP) cisplatin), anthracyclines (e.g., daunorubicin (formerly daunomycin) and doxorubicin), antibiotics (e.g., dactinomycin (formerly actinomycin), bleomycin, mithramycin, and anthramycin (AMC)), and anti-mitotic agents (e.g., vincristine and vinblastine).

[0229] The conjugates of the invention can be used for modifying a given biological response, the therapeutic agent or drug moiety is not to be construed as limited to classical chemical therapeutic agents. For example, the drug moiety may be a protein or polypeptide possessing a desired biological activity. Such proteins may include, for example, a toxin such as abrin, ricin A, pseudomonas exotoxin, or diphtheria toxin; a protein such as tumor necrosis factor, alpha-interferon, β-interferon, nerve growth factor, platelet derived growth factor, tissue plasminogen activator, an apoptotic agent, e.g., TNF-alpha, TNF-beta, AIM I (See, International Publication No. WO 97/33899), AIM II (See, International Publication No. WO 97/34911), Fas Ligand (Takahashi et al., Int. Immunol., 6:1567-1574 (1994)), VEGI (See, International Publication No. WO 99/23105), a thrombotic agent or an anti-angiogenic agent, e.g., angiostatin or endostatin; or, biological response modifiers such as, for example, lymphokines, interleukin-1 (“IL-1”), interleukin-2 (“IL-2”), interleukin-6 (“IL-6”), granulocyte macrophage colony stimulating factor (“GM-CSF”), granulocyte colony stimulating factor (“G-CSF”), or other growth factors.

[0230] Antibodies may also be attached to solid supports, which are particularly useful for immunoassays or purification of the target antigen. Such solid supports include, but are not limited to, glass, cellulose, polyacrylamide, nylon, polystyrene, polyvinyl chloride or polypropylene.

[0231] Techniques for conjugating such therapeutic moiety to antibodies are well known. See, for example, Amon et al., “Monoclonal Antibodies For Immunotargeting Of Drugs In Cancer Therapy”, in Monoclonal Antibodies And Cancer Therapy, Reisfeld et al. (eds.), pp. 243-56 (Alan R. Liss, Inc. 1985); Hellstrom et al., “Antibodies For Drug Delivery”, in Controlled Drug Delivery (2nd Ed.), Robinson et al. (eds.), pp. 623-53 (Marcel Dekker, Inc. 1987); Thorpe, “Antibody Carriers Of Cytotoxic Agents In Cancer Therapy: A Review”, in Monoclonal Antibodies '84: Biological And Clinical Applications, Pinchera et al. (eds.), pp. 475-506 (1985); “Analysis, Results, And Future Prospective Of The Therapeutic Use Of Radiolabeled Antibody In Cancer Therapy”, in Monoclonal Antibodies For Cancer Detection And Therapy, Baldwin et al. (eds.), pp. 303-16 (Academic Press 1985), and Thorpe et al., “The Preparation And Cytotoxic Properties Of Antibody-Toxin Conjugates”, Immunol. Rev. 62:119-58 (1982).

[0232] Alternatively, an antibody can be conjugated to a second antibody to form an antibody heteroconjugate as described by Segal in U.S. Pat. No. 4,676,980, which is incorporated herein by reference in its entirety.

[0233] An antibody, with or without a therapeutic moiety conjugated to it, administered alone or in combination with cytotoxic factor(s) and/or cytokine(s) can be used as a therapeutic.

[0234] Antibody-Albumin Fusion

[0235] Antibodies that bind to a Therapeutic protein and that may correspond to a Therapeutic protein portion of an albumin fusion protein of the invention include, but are not limited to, antibodies that bind a Therapeutic protein disclosed in the “Therapeutic Protein X” column of Table 1, or a fragment or variant thereof.

[0236] In specific embodiments, the fragment or variant of an antibody that immunospecifically binds a Therapeutic protein and that corresponds to a Therapeutic protein portion of an albumin fusion protein comprises, or alternatively consists of, the VH domain. In other embodiments, the fragment or variant of an antibody that immunospecifically binds a Therapeutic protein and that corresponds to a Therapeutic protein portion of an albumin fusion protein comprises, or alternatively consists of, one, two or three VH CDRs. In other embodiments, the fragment or variant of an antibody that immunospecifically binds a Therapeutic protein and that corresponds to a Therapeutic protein portion of an albumin fusion protein comprises, or alternatively consists of, the VH CDR1. In other embodiments, the fragment or variant of an antibody that immunospecifically binds a Therapeutic protein and that corresponds to a Therapeutic protein portion of an albumin fusion protein comprises, or alternatively consists of, the VH CDR2. In other embodiments, the fragment or variant of an antibody that immunospecifically binds a Therapeutic protein and that corresponds to a Therapeutic protein portion of an albumin fusion protein comprises, or alternatively consists of, the VH CDR3.

[0237] In specific embodiments, the fragment or variant of an antibody that immunospecifically binds a Therapeutic protein and that corresponds to a Therapeutic protein portion of an albumin fusion protein comprises, or alternatively consists of, the VL domain. In other embodiments, the fragment or variant of an antibody that immunospecifically binds a Therapeutic protein and that corresponds to a Therapeutic protein portion of an albumin fusion protein comprises, or alternatively consists of, one, two or three VL CDRs. In other embodiments, the fragment or variant of an antibody that immunospecifically binds a Therapeutic protein and that corresponds to a Therapeutic protein portion of an albumin fusion protein comprises, or alternatively consists of, the VL CDR1. In other embodiments, the fragment or variant of an antibody that immunospecifically binds a Therapeutic protein and that corresponds to a Therapeutic protein portion of an albumin fusion protein comprises, or alternatively consists of, the VL CDR2. In other embodiments, the fragment or variant of an antibody that immunospecifically binds a Therapeutic protein and that corresponds to a Therapeutic protein portion of an albumin fusion protein comprises, or alternatively consists of, the VL CDR3.

[0238] In other embodiments, the fragment or variant of an antibody that immunospecifically binds a Therapeutic protein and that corresponds to a Therapeutic protein portion of an albumin fusion protein comprises, or alternatively consists of, one, two, three, four, five, or six VH and/or VL CDRs.

[0239] In preferred embodiments, the fragment or variant of an antibody that immunospecifically binds a Therapeutic protein and that corresponds to a Therapeutic protein portion of an albumin fusion protein comprises, or alternatively consists of, an scFv comprising the VH domain of the Therapeutic antibody, linked to the VL domain of the therapeutic antibody by a peptide linker such as (Gly₄Ser)₃ (SEQ ID NO:4).

[0240] Immunophenotyping

[0241] The antibodies of the invention or albumin fusion proteins of the invention comprising at least a fragment or variant of an antibody that binds a Therapeutic protein (or fragment or variant thereof) may be utilized for immunophenotyping of cell lines and biological samples. Therapeutic proteins of the present invention may be useful as cell-specific markers, or more specifically as cellular markers that are differentially expressed at various stages of differentiation and/or maturation of particular cell types. Monoclonal antibodies (or albumin fusion proteins comprising at least a fragment or variant of an antibody that binds a Therapeutic protein) directed against a specific epitope, or combination of epitopes, will allow for the screening of cellular populations expressing the marker. Various techniques can be utilized using monoclonal antibodies (or albumin fusion proteins comprising at least a fragment or variant of an antibody that binds a Therapeutic protein) to screen for cellular populations expressing the marker(s), and include magnetic separation using antibody-coated magnetic beads, “panning” with antibody attached to a solid matrix (i.e., plate), and flow cytometry (See, e.g., U.S. Pat. No. 5,985,660; and Morrison et al., Cell, 96:737-49 (1999)).

[0242] These techniques allow for the screening of particular populations of cells, such as might be found with hematological malignancies (i.e. minimal residual disease (MRD) in acute leukemic patients) and “non-self” cells in transplantations to prevent Graft-versus-Host Disease (GVHD). Alternatively, these techniques allow for the screening of hematopoietic stem and progenitor cells capable of undergoing proliferation and/or differentiation, as might be found in human umbilical cord blood.

[0243] Characterizing Antibodies that Bind a Therapeutic Protein and Albumin Fusion Proteins Comprising a Fragment or Variant of an Antibody that Binds a Therapeutic Protein

[0244] The antibodies of the invention or albumin fusion proteins of the invention comprising at least a fragment or variant of an antibody that binds a Therapeutic protein (or fragment or variant thereof) may be characterized in a variety of ways. In particular, Albumin fusion proteins of the invention comprising at least a fragment or variant of an antibody that binds a Therapeutic protein may be assayed for the ability to specifically bind to the same antigens specifically bound by the antibody that binds a Therapeutic protein corresponding to the antibody that binds a Therapeutic protein portion of the albumin fusion protein using techniques described herein or routinely modifying techniques known in the art.

[0245] Assays for the ability of the antibodies of the invention or albumin fusion proteins of the invention comprising at least a fragment or variant of an antibody that binds a Therapeutic protein (or fragment or variant thereof) to (specifically) bind a specific protein or epitope may be performed in solution (e.g., Houghten, Bio/Techniques 13:412-421 (1992)), on beads (e.g., Lam, Nature 354:82-84 (1991)), on chips (e.g., Fodor, Nature 364:555-556 (1993)), on bacteria (e.g., U.S. Pat. No. 5,223,409), on spores (e.g., U.S. Pat. Nos. 5,571,698; 5,403,484; and 5,223,409), on plasmids (e.g., Cull et al., Proc. Natl. Acad. Sci. USA 89:1865-1869 (1992)) or on phage (e.g., Scott and Smith, Science 249:386-390 (1990); Devlin, Science 249:404-406 (1990); Cwirla et al., Proc. Natl. Acad. Sci. USA 87:6378-6382 (1990); and Felici, J. Mol. Biol. 222:301-310 (1991)) (each of these references is incorporated herein in its entirety by reference). The antibodies of the invention or albumin fusion proteins of the invention comprising at least a fragment or variant of an antibody that binds a Therapeutic protein (or fragment or variant thereof) may also be assayed for their specificity and affinity for a specific protein or epitope using or routinely modifying techniques described herein or otherwise known in the art.

[0246] The albumin fusion proteins of the invention comprising at least a fragment or variant of an antibody that binds a Therapeutic protein may be assayed for cross-reactivity with other antigens (e.g., molecules that have sequence/structure conservation with the molecule(s) specifically bound by the antibody that binds a Therapeutic protein (or fragment or variant thereof) corresponding to the Therapeutic protein portion of the albumin fusion protein of the invention) by any method known in the art.

[0247] Immunoassays which can be used to analyze (immunospecific) binding and cross-reactivity include, but are not limited to, competitive and non-competitive assay systems using techniques such as western blots, radioimmunoassays, ELISA (enzyme linked immunosorbent assay), “sandwich” immunoassays, immunoprecipitation assays, precipitin reactions, gel diffusion precipitin reactions, immunodiffusion assays, agglutination assays, complement-fixation assays, immunoradiometric assays, fluorescent immunoassays, and protein A immunoassays, to name but a few. Such assays are routine and well known in the art (see, e.g., Ausubel et al, eds, 1994, Current Protocols in Molecular Biology, Vol. 1, John Wiley & Sons, Inc., New York, which is incorporated by reference herein in its entirety). Exemplary immunoassays are described briefly below (but are not intended by way of limitation).

[0248] Immunoprecipitation protocols generally comprise lysing a population of cells in a lysis buffer such as RIPA buffer (1% NP-40 or Triton X-100, 1% sodium deoxycholate, 0.1% SDS, 0.15 M NaCl, 0.01 M sodium phosphate at pH 7.2, 1% Trasylol) supplemented with protein phosphatase and/or protease inhibitors (e.g., EDTA, PMSF, aprotinin, sodium vanadate), adding an antibody of the invention or albumin fusion protein of the invention comprising at least a fragment or variant of an antibody that binds a Therapeutic protein (or fragment or variant thereof) to the cell lysate, incubating for a period of time (e.g., 1 to 4 hours) at 40 degrees C., adding protein A and/or protein G sepharose beads (or beads coated with an appropriate anti-idiotypic antibody or anti-albumin antibody in the case when an albumin fusion protein comprising at least a fragment or variant of a Therapeutic antibody) to the cell lysate, incubating for about an hour or more at 40 degrees C., washing the beads in lysis buffer and resuspending the beads in SDS/sample buffer. The ability of the antibody or albumin fusion protein of the invention to immunoprecipitate a particular antigen can be assessed by, e.g., western blot analysis. One of skill in the art would be knowledgeable as to the parameters that can be modified to increase the binding of the antibody or albumin fusion protein to an antigen and decrease the background (e.g., pre-clearing the cell lysate with sepharose beads). For further discussion regarding immunoprecipitation protocols see, e.g., Ausubel et al, eds, 1994, Current Protocols in Molecular Biology, Vol. 1, John Wiley & Sons, Inc., New York at 10.16.1.

[0249] Western blot analysis generally comprises preparing protein samples, electrophoresis of the protein samples in a polyacrylamide gel (e.g., 8%-20% SDS-PAGE depending on the molecular weight of the antigen), transferring the protein sample from the polyacrylamide gel to a membrane such as nitrocellulose, PVDF or nylon, blocking the membrane in blocking solution (e.g., PBS with 3% BSA or non-fat milk), washing the membrane in washing buffer (e.g., PBS-Tween 20), applying the antibody or albumin fusion protein of the invention (diluted in blocking buffer) to the membrane, washing the membrane in washing buffer, applying a secondary antibody (which recognizes the albumin fusion protein, e.g., an anti-human serum albumin antibody) conjugated to an enzymatic substrate (e.g., horseradish peroxidase or alkaline phosphatase) or radioactive molecule (e.g., ³²P or ¹²⁵I) diluted in blocking buffer, washing the membrane in wash buffer, and detecting the presence of the antigen. One of skill in the art would be knowledgeable as to the parameters that can be modified to increase the signal detected and to reduce the background noise. For further discussion regarding western blot protocols see, e.g., Ausubel et al, eds, 1994, Current Protocols in Molecular Biology, Vol. 1, John Wiley & Sons, Inc., New York at 10.8.1.

[0250] ELISAs comprise preparing antigen, coating the well of a 96-well microtiter plate with the antigen, washing away antigen that did not bind the wells, adding the antibody or albumin fusion protein (comprising at least a fragment or variant of an antibody that binds a Therapeutic protein) of the invention conjugated to a detectable compound such as an enzymatic substrate (e.g., horseradish peroxidase or alkaline phosphatase) to the wells and incubating for a period of time, washing away unbound or non-specifically bound albumin fusion proteins, and detecting the presence of the antibody or albumin fusion proteins specifically bound to the antigen coating the well. In ELISAs the antibody or albumin fusion protein does not have to be conjugated to a detectable compound; instead, a second antibody (which recognizes the antibody or albumin fusion protein, respectively) conjugated to a detectable compound may be added to the well. Further, instead of coating the well with the antigen, antibody or the albumin fusion protein may be coated to the well. In this case, the detectable molecule could be the antigen conjugated to a detectable compound such as an enzymatic substrate (e.g., horseradish peroxidase or alkaline phosphatase). One of skill in the art would be knowledgeable as to the parameters that can be modified to increase the signal detected as well as other variations of ELISAs known in the art. For further discussion regarding ELISAs see, e.g., Ausubel et al, eds, 1994, Current Protocols in Molecular Biology, Vol. 1, John Wiley & Sons, Inc., New York at 11.2.1.

[0251] The binding affinity of an albumin fusion protein to a protein, antigen, or epitope and the off-rate of an antibody- or albumin fusion protein-protein/antigen/epitope interaction can be determined by competitive binding assays. One example of a competitive binding assay is a radioimmunoassay comprising the incubation of labeled antigen (e.g., ³H or ¹²⁵I) with the antibody or albumin fusion protein of the invention in the presence of increasing amounts of unlabeled antigen, and the detection of the antibody bound to the labeled antigen. The affinity of the antibody or albumin fusion protein of the invention for a specific protein, antigen, or epitope and the binding off-rates can be determined from the data by Scatchard plot analysis. Competition with a second protein that binds the same protein, antigen or epitope as the antibody or albumin fusion protein, can also be determined using radioimmunoassays. In this case, the protein, antigen or epitope is incubated with an antibody or albumin fusion protein of the invention conjugated to a labeled compound (e.g., ³H or ¹²⁵I) in the presence of increasing amounts of an unlabeled second protein that binds the same protein, antigen, or epitope as the albumin fusion protein of the invention.

[0252] In a preferred embodiment, BIAcore kinetic analysis is used to determine the binding on and off rates of antibody or albumin fusion proteins of the invention to a protein, antigen or epitope. BIAcore kinetic analysis comprises analyzing the binding and dissociation of antibodies, albumin fusion proteins, or specific polypeptides, antigens or epitopes from chips with immobilized specific polypeptides, antigens or epitopes, antibodies or albumin fusion proteins, respectively, on their surface.

[0253] Therapeutic Uses

[0254] The present invention is further directed to antibody-based therapies which involve administering antibodies of the invention or albumin fusion proteins of the invention comprising at least a fragment or variant of an antibody that binds a Therapeutic protein to an animal, preferably a mammal, and most preferably a human, patient for treating one or more of the disclosed diseases, disorders, or conditions. Therapeutic compounds of the invention include, but are not limited to, antibodies of the invention (including fragments, analogs and derivatives thereof as described herein), nucleic acids encoding antibodies of the invention (including fragments, analogs and derivatives thereof and anti-idiotypic antibodies as described herein), albumin fusion proteins of the invention comprising at least a fragment or variant of an antibody that binds a Therapeutic protein, and nucleic acids encoding such albumin fusion proteins. The antibodies of the invention or albumin fusion proteins of the invention comprising at least a fragment or variant of an antibody that binds a Therapeutic protein can be used to treat, inhibit or prevent diseases, disorders or conditions associated with aberrant expression and/or activity of a Therapeutic protein, including, but not limited to, any one or more of the diseases, disorders, or conditions described herein. The treatment and/or prevention of diseases, disorders, or conditions associated with aberrant expression and/or activity of a Therapeutic protein includes, but is not limited to, alleviating symptoms associated with those diseases, disorders or conditions. Antibodies of the invention or albumin fusion proteins of the invention comprising at least a fragment or variant of an antibody that binds a Therapeutic protein may be provided in pharmaceutically acceptable compositions as known in the art or as described herein.

[0255] In a specific and preferred embodiment, the present invention is directed to antibody-based therapies which involve administering antibodies of the invention or albumin fusion proteins of the invention comprising at least a fragment or variant of an antibody that binds a Therapeutic protein to an animal, preferably a mammal, and most preferably a human, patient for treating one or more diseases, disorders, or conditions, including but not limited to: neural disorders, immune system disorders, muscular disorders, reproductive disorders, gastrointestinal disorders, pulmonary disorders, cardiovascular disorders, renal disorders, proliferative disorders, and/or cancerous diseases and conditions., and/or as described elsewhere herein. Therapeutic compounds of the invention include, but are not limited to, antibodies of the invention (e.g., antibodies directed to the full length protein expressed on the cell surface of a mammalian cell; antibodies directed to an epitope of a Therapeutic protein and nucleic acids encoding antibodies of the invention (including fragments, analogs and derivatives thereof and anti-idiotypic antibodies as described herein). The antibodies of the invention can be used to treat, inhibit or prevent diseases, disorders or conditions associated with aberrant expression and/or activity of a Therapeutic protein, including, but not limited to, any one or more of the diseases, disorders, or conditions described herein. The treatment and/or prevention of diseases, disorders, or conditions associated with aberrant expression and/or activity of a Therapeutic protein includes, but is not limited to, alleviating symptoms associated with those diseases, disorders or conditions. Antibodies of the invention or albumin fusion proteins of the invention comprising at least a fragment or variant of an antibody that binds a Therapeutic protein may be provided in pharmaceutically acceptable compositions as known in the art or as described herein.

[0256] A summary of the ways in which the antibodies of the invention or albumin fusion proteins of the invention comprising at least a fragment or variant of an antibody that binds a Therapeutic protein may be used therapeutically includes binding Therapeutic proteins locally or systemically in the body or by direct cytotoxicity of the antibody, e.g. as mediated by complement (CDC) or by effector cells (ADCC). Some of these approaches are described in more detail below. Armed with the teachings provided herein, one of ordinary skill in the art will know how to use the antibodies of the invention or albumin fusion proteins of the invention comprising at least a fragment or variant of an antibody that binds a Therapeutic protein for diagnostic, monitoring or therapeutic purposes without undue experimentation.

[0257] The antibodies of the invention or albumin fusion proteins of the invention comprising at least a fragment or variant of an antibody that binds a Therapeutic protein may be advantageously utilized in combination with other monoclonal or chimeric antibodies, or with lymphokines or hematopoietic growth factors (such as, e.g., IL-2, IL-3 and IL-7), for example, which serve to increase the number or activity of effector cells which interact with the antibodies.

[0258] The antibodies of the invention or albumin fusion proteins of the invention comprising at least a fragment or variant of an antibody that binds a Therapeutic protein may be administered alone or in combination with other types of treatments (e.g., radiation therapy, chemotherapy, hormonal therapy, immunotherapy and anti-tumor agents). Generally, administration of products of a species origin or species reactivity (in the case of antibodies) that is the same species as that of the patient is preferred. Thus, in a preferred embodiment, human antibodies, fragments derivatives, analogs, or nucleic acids, are administered to a human patient for therapy or prophylaxis.

[0259] It is preferred to use high affinity and/or potent in vivo inhibiting and/or neutralizing antibodies against Therapeutic proteins, fragments or regions thereof, (or the albumin fusion protein correlate of such an antibody) for both immunoassays directed to and therapy of disorders related to polynucleotides or polypeptides, including fragments thereof, of the present invention. Such antibodies, fragments, or regions, will preferably have an affinity for polynucleotides or polypeptides of the invention, including fragments thereof. Preferred binding affinities include dissociation constants or Kd's less than 5×10⁻² M, 10⁻² M, 5×10⁻³ M, 10⁻³ M, 5×10⁻⁴ M, 10⁻⁴ M. More preferred binding affinities include those with a dissociation constant or Kd less than 5×10⁻⁵ M, 10⁻⁵ M, 5×10⁻⁶ M, 10⁻⁶M, 5×10⁻⁷ M, 10⁻⁷ M, 5×10⁻⁸ M or 10⁻⁸ M. Even more preferred binding affinities include those with a dissociation constant or Kd less than 5×10⁻⁹ M, 10⁻⁹ M, 5×10⁻¹⁰ M, 10⁻¹⁰ M, 5×10⁻¹¹ M, 10⁻¹¹ M, 5×10⁻¹² M, 10⁻¹² M, 5×10⁻¹³ M, 10⁻¹³ M, 5×10⁻¹⁴ M, 10⁻¹⁴ M, 5×10⁻¹⁵ M, or 10⁻⁵ M.

[0260] Gene Therapy

[0261] In a specific embodiment, nucleic acids comprising sequences encoding antibodies that bind therapeutic proteins or albumin fusion proteins comprising at least a fragment or variant of an antibody that binds a Therapeutic protein are administered to treat, inhibit or prevent a disease or disorder associated with aberrant expression and/or activity of a Therapeutic protein, by way of gene therapy. Gene therapy refers to therapy performed by the administration to a subject of an expressed or expressible nucleic acid. In this embodiment of the invention, the nucleic acids produce their encoded protein that mediates a therapeutic effect.

[0262] Any of the methods for gene therapy available in the art can be used according to the present invention. Exemplary methods are described in more detail elsewhere in this application.

[0263] Demonstration of Therapeutic or Prophylactic Activity

[0264] The compounds or pharmaceutical compositions of the invention are preferably tested in vitro, and then in vivo for the desired therapeutic or prophylactic activity, prior to use in humans. For example, in vitro assays to demonstrate the therapeutic or prophylactic utility of a compound or pharmaceutical composition include, the effect of a compound on a cell line or a patient tissue sample. The effect of the compound or composition on the cell line and/or tissue sample can be determined utilizing techniques known to those of skill in the art including, but not limited to, rosette formation assays and cell lysis assays. In accordance with the invention, in vitro assays which can be used to determine whether administration of a specific compound is indicated, include in vitro cell culture assays in which a patient tissue sample is grown in culture, and exposed to or otherwise administered a compound, and the effect of such compound upon the tissue sample is observed.

[0265] Therapeutic/Prophylactic Administration and Composition

[0266] The invention provides methods of treatment, inhibition and prophylaxis by administration to a subject of an effective amount of a compound or pharmaceutical composition of the invention. In a preferred embodiment, the compound is substantially purified (e.g., substantially free from substances that limit its effect or produce undesired side-effects). The subject is preferably an animal, including but not limited to animals such as cows, pigs, horses, chickens, cats, dogs, etc., and is preferably a mammal, and most preferably human.

[0267] Formulations and methods of administration that can be employed when the compound comprises a nucleic acid or an immunoglobulin are described above; additional appropriate formulations and routes of administration can be selected from among those described herein below.

[0268] Various delivery systems are known and can be used to administer a compound of the invention, e.g., encapsulation in liposomes, microparticles, microcapsules, recombinant cells capable of expressing the compound, receptor-mediated endocytosis (see, e.g., Wu and Wu, J. Biol. Chem. 262:4429-4432 (1987)), construction of a nucleic acid as part of a retroviral or other vector, etc. Methods of introduction include but are not limited to intradermal, intramuscular, intraperitoneal, intravenous, subcutaneous, intranasal, epidural, and oral routes. The compounds or compositions may be administered by any convenient route, for example by infusion or bolus injection, by absorption through epithelial or mucocutaneous linings (e.g., oral mucosa, rectal and intestinal mucosa, etc.) and may be administered together with other biologically active agents. Administration can be systemic or local. In addition, it may be desirable to introduce the pharmaceutical compounds or compositions of the invention into the central nervous system by any suitable route, including intraventricular and intrathecal injection; intraventricular injection may be facilitated by an intraventricular catheter, for example, attached to a reservoir, such as an Ommaya reservoir. Pulmonary administration can also be employed, e.g., by use of an inhaler or nebulizer, and formulation with an aerosolizing agent.

[0269] In a specific embodiment, it may be desirable to administer the pharmaceutical compounds or compositions of the invention locally to the area in need of treatment; this may be achieved by, for example, and not by way of limitation, local infusion during surgery, topical application, e.g., in conjunction with a wound dressing after surgery, by injection, by means of a catheter, by means of a suppository, or by means of an implant, said implant being of a porous, non-porous, or gelatinous material, including membranes, such as sialastic membranes, or fibers. Preferably, when administering a protein, including an antibody, of the invention, care must be taken to use materials to which the protein does not absorb.

[0270] In another embodiment, the compound or composition can be delivered in a vesicle, in particular a liposome (see Langer, Science 249:1527-1533 (1990); Treat et al., in Liposomes in the Therapy of Infectious Disease and Cancer, Lopez-Berestein and Fidler (eds.), Liss, New York, pp. 353-365 (1989); Lopez-Berestein, ibid., pp. 317-327; see generally ibid.)

[0271] In yet another embodiment, the compound or composition can be delivered in a controlled release system. In one embodiment, a pump may be used (see Langer, supra; Sefton, CRC Crit. Ref. Biomed. Eng. 14:201 (1987); Buchwald et al., Surgery 88:507 (1980); Saudek et al., N. Engl. J. Med. 321:574 (1989)). In another embodiment, polymeric materials can be used (see Medical Applications of Controlled Release, Langer and Wise (eds.), CRC Pres., Boca Raton, Fla. (1974); Controlled Drug Bioavailability, Drug Product Design and Performance, Smolen and Ball (eds.), Wiley, New York (1984); Ranger and Peppas, J., Macromol. Sci. Rev. Macromol. Chem. 23:61 (1983); see also Levy et al., Science 228:190 (1985); During et al., Ann. Neurol. 25:351 (1989); Howard et al., J. Neurosurg. 71:105 (1989)). In yet another embodiment, a controlled release system can be placed in proximity of the therapeutic target, e.g., the brain, thus requiring only a fraction of the systemic dose (see, e.g., Goodson, in Medical Applications of Controlled Release, supra, vol. 2, pp. 115-138 (1984)).

[0272] Other controlled release systems are discussed in the review by Langer (Science 249:1527-1533 (1990)).

[0273] In a specific embodiment where the compound of the invention is a nucleic acid encoding a protein, the nucleic acid can be administered in vivo to promote expression of its encoded protein, by constructing it as part of an appropriate nucleic acid expression vector and administering it so that it becomes intracellular, e.g., by use of a retroviral vector (see U.S. Pat. No. 4,980,286), or by direct injection, or by use of microparticle bombardment (e.g., a gene gun; Biolistic, Dupont), or coating with lipids or cell-surface receptors or transfecting agents, or by administering it in linkage to a homeobox-like peptide which is known to enter the nucleus (see e.g., Joliot et al., Proc. Natl. Acad. Sci. USA 88:1864-1868 (1991)), etc. Alternatively, a nucleic acid can be introduced intracellularly and incorporated within host cell DNA for expression, by homologous recombination.

[0274] The present invention also provides pharmaceutical compositions. Such compositions comprise a therapeutically effective amount of a compound, and a pharmaceutically acceptable carrier. In a specific embodiment, the term “pharmaceutically acceptable” means approved by a regulatory agency of the Federal or a state government or listed in the U.S. Pharmacopeia or other generally recognized pharmacopeia for use in animals, and more particularly in humans. The term “carrier” refers to a diluent, adjuvant, excipient, or vehicle with which the therapeutic is administered. Such pharmaceutical carriers can be sterile liquids, such as water and oils, including those of petroleum, animal, vegetable or synthetic origin, such as peanut oil, soybean oil, mineral oil, sesame oil and the like. Water is a preferred carrier when the pharmaceutical composition is administered intravenously. Saline solutions and aqueous dextrose and glycerol solutions can also be employed as liquid carriers, particularly for injectable solutions. Suitable pharmaceutical excipients include starch, glucose, lactose, sucrose, gelatin, malt, rice, flour, chalk, silica gel, sodium stearate, glycerol monostearate, talc, sodium chloride, dried skim milk, glycerol, propylene, glycol, water, ethanol and the like. The composition, if desired, can also contain minor amounts of wetting or emulsifying agents, or pH buffering agents. These compositions can take the form of solutions, suspensions, emulsion, tablets, pills, capsules, powders, sustained-release formulations and the like. The composition can be formulated as a suppository, with traditional binders and carriers such as triglycerides. Oral formulation can include standard carriers such as pharmaceutical grades of mannitol, lactose, starch, magnesium stearate, sodium saccharine, cellulose, magnesium carbonate, etc. Examples of suitable pharmaceutical carriers are described in “Remington's Pharmaceutical Sciences” by E. W. Martin. Such compositions will contain a therapeutically effective amount of the compound, preferably in purified form, together with a suitable amount of carrier so as to provide the form for proper administration to the patient. The formulation should suit the mode of administration.

[0275] In a preferred embodiment, the composition is formulated in accordance with routine procedures as a pharmaceutical composition adapted for intravenous administration to human beings. Typically, compositions for intravenous administration are solutions in sterile isotonic aqueous buffer. Where necessary, the composition may also include a solubilizing agent and a local anesthetic such as lignocaine to ease pain at the site of the injection. Generally, the ingredients are supplied either separately or mixed together in unit dosage form, for example, as a dry lyophilized powder or water free concentrate in a hermetically sealed container such as an ampoule or sachette indicating the quantity of active agent. Where the composition is to be administered by infusion, it can be dispensed with an infusion bottle containing sterile pharmaceutical grade water or saline. Where the composition is administered by injection, an ampoule of sterile water for injection or saline can be provided so that the ingredients may be mixed prior to administration.

[0276] The compounds of the invention can be formulated as neutral or salt forms. Pharmaceutically acceptable salts include those formed with anions such as those derived from hydrochloric, phosphoric, acetic, oxalic, tartaric acids, etc., and those formed with cations such as those derived from sodium, potassium, ammonium, calcium, ferric hydroxides, isopropylamine, triethylamine, 2-ethylamino ethanol, histidine, procaine, etc.

[0277] The amount of the compound of the invention which will be effective in the treatment, inhibition and prevention of a disease or disorder associated with aberrant expression and/or activity of a Therapeutic protein can be determined by standard clinical techniques. In addition, in vitro assays may optionally be employed to help identify optimal dosage ranges. The precise dose to be employed in the formulation will also depend on the route of administration, and the seriousness of the disease or disorder, and should be decided according to the judgment of the practitioner and each patient's circumstances. Effective doses may be extrapolated from dose-response curves derived from in vitro or animal model test systems.

[0278] For antibodies, the dosage administered to a patient is typically 0.1 mg/kg to 100 mg/kg of the patient's body weight. Preferably, the dosage administered to a patient is between 0.1 mg/kg and 20 mg/kg of the patient's body weight, more preferably 1 mg/kg to 10 mg/kg of the patient's body weight. Generally, human antibodies have a longer half-life within the human body than antibodies from other species due to the immune response to the foreign polypeptides. Thus, lower dosages of human antibodies and less frequent administration is often possible. Further, the dosage and frequency of administration of antibodies of the invention may be reduced by enhancing uptake and tissue penetration (e.g., into the brain) of the antibodies by modifications such as, for example, lipidation.

[0279] Diagnosis and Imaging

[0280] Labeled antibodies and derivatives and analogs thereof that bind a Therapeutic protein (or fragment or variant thereof) (including albumin fusion proteins comprising at least a fragment or variant of an antibody that binds a Therapeutic protein), can be used for diagnostic purposes to detect, diagnose, or monitor diseases, disorders, and/or conditions associated with the aberrant expression and/or activity of Therapeutic protein. The invention provides for the detection of aberrant expression of a Therapeutic protein, comprising (a) assaying the expression of the Therapeutic protein in cells or body fluid of an individual using one or more antibodies specific to the polypeptide interest and (b) comparing the level of gene expression with a standard gene expression level, whereby an increase or decrease in the assayed Therapeutic protein expression level compared to the standard expression level is indicative of aberrant expression.

[0281] The invention provides a diagnostic assay for diagnosing a disorder, comprising (a) assaying the expression of the Therapeutic protein in cells or body fluid of an individual using one or more antibodies specific to the Therapeutic protein or albumin fusion proteins comprising at least a fragment of variant of an antibody specific to a Therapeutic protein, and (b) comparing the level of gene expression with a standard gene expression level, whereby an increase or decrease in the assayed Therapeutic protein gene expression level compared to the standard expression level is indicative of a particular disorder. With respect to cancer, the presence of a relatively high amount of transcript in biopsied tissue from an individual may indicate a predisposition for the development of the disease, or may provide a means for detecting the disease prior to the appearance of actual clinical symptoms. A more definitive diagnosis of this type may allow health professionals to employ preventative measures or aggressive treatment earlier thereby preventing the development or further progression of the cancer.

[0282] Antibodies of the invention or albumin fusion proteins comprising at least a fragment of variant of an antibody specific to a Therapeutic protein can be used to assay protein levels in a biological sample using classical immunohistological methods known to those of skill in the art (e.g., see Jalkanen et al., J. Cell. Biol. 101:976-985 (1985); Jalkanen et al., J. Cell. Biol. 105:3087-3096 (1987)). Other antibody-based methods useful for detecting protein gene expression include immunoassays, such as the enzyme linked immunosorbent assay (ELISA) and the radioimmunoassay (RIA). Suitable antibody assay labels are known in the art and include enzyme labels, such as, glucose oxidase; radioisotopes, such as iodine (125I, 121I), carbon (14C), sulfur (35S), tritium (3H), indium (112In), and technetium (99Tc); luminescent labels, such as luminol; and fluorescent labels, such as fluorescein and rhodamine, and biotin.

[0283] One facet of the invention is the detection and diagnosis of a disease or disorder associated with aberrant expression of a Therapeutic protein in an animal, preferably a mammal and most preferably a human. In one embodiment, diagnosis comprises: a) administering (for example, parenterally, subcutaneously, or intraperitoneally) to a subject an effective amount of a labeled molecule which specifically binds to the polypeptide of interest; b) waiting for a time interval following the administering for permitting the labeled molecule to preferentially concentrate at sites in the subject where the Therapeutic protein is expressed (and for unbound labeled molecule to be cleared to background level); c) determining background level; and d) detecting the labeled molecule in the subject, such that detection of labeled molecule above the background level indicates that the subject has a particular disease or disorder associated with aberrant expression of the therapeutic protein. Background level can be determined by various methods including, comparing the amount of labeled molecule detected to a standard value previously determined for a particular system.

[0284] It will be understood in the art that the size of the subject and the imaging system used will determine the quantity of imaging moiety needed to produce diagnostic images. In the case of a radioisotope moiety, for a human subject, the quantity of radioactivity injected will normally range from about 5 to 20 millicuries of ^{99m}Tc. The labeled antibody, antibody fragment, or albumin fusion protein comprising at least a fragment or variant of an antibody that binds a Therapeutic protein will then preferentially accumulate at the location of cells which contain the specific Therapeutic protein. In vivo tumor imaging is described in S. W. Burchiel et al., “Immunopharmacokinetics of Radiolabeled Antibodies and Their Fragments.” (Chapter 13 in Tumor Imaging The Radiochemical Detection of Cancer, S. W. Burchiel and B. A. Rhodes, eds., Masson Publishing Inc. (1982)).

[0285] Depending on several variables, including the type of label used and the mode of administration, the time interval following the administration for permitting the labeled molecule to preferentially concentrate at sites in the subject and for unbound labeled molecule to be cleared to background level is 6 to 48 hours or 6 to 24 hours or 6 to 12 hours. In another embodiment the time interval following administration is 5 to 20 days or 5 to 10 days.

[0286] In an embodiment, monitoring of the disease or disorder is carried out by repeating the method for diagnosing the disease or disease, for example, one month after initial diagnosis, six months after initial diagnosis, one year after initial diagnosis, etc.

[0287] Presence of the labeled molecule can be detected in the patient using methods known in the art for in vivo scanning. These methods depend upon the type of label used. Skilled artisans will be able to determine the appropriate method for detecting a particular label. Methods and devices that may be used in the diagnostic methods of the invention include, but are not limited to, computed tomography (CT), whole body scan such as position emission tomography (PET), magnetic resonance imaging (MRI), and sonography.

[0288] In a specific embodiment, the molecule is labeled with a radioisotope and is detected in the patient using a radiation responsive surgical instrument (Thurston et al., U.S. Pat. No. 5,441,050). In another embodiment, the molecule is labeled with a fluorescent compound and is detected in the patient using a fluorescence responsive scanning instrument. In another embodiment, the molecule is labeled with a positron emitting metal and is detected in the patent using positron emission-tomography. In yet another embodiment, the molecule is labeled with a paramagnetic label and is detected in a patient using magnetic resonance imaging (MRI). Antibodies that specifically detect the albumin fusion protein but not albumin or the therapeutic protein alone are a preferred embodiment. These can be used to detect the albumin fusion protein as described throughout the specification.

[0289] Kits

[0290] The present invention provides kits that can be used in the above methods. In one embodiment, a kit comprises an antibody, preferably a purified antibody, in one or more containers. In a specific embodiment, the kits of the present invention contain a substantially isolated polypeptide comprising an epitope which is specifically immunoreactive with an antibody included in the kit. Preferably, the kits of the present invention further comprise a control antibody which does not react with the polypeptide of interest. In another specific embodiment, the kits of the present invention contain a means for detecting the binding of an antibody to a polypeptide of interest (e.g., the antibody may be conjugated to a detectable substrate such as a fluorescent compound, an enzymatic substrate, a radioactive compound or a luminescent compound, or a second antibody which recognizes the first antibody may be conjugated to a detectable substrate).

[0291] In another specific embodiment of the present invention, the kit is a diagnostic kit for use in screening serum containing antibodies specific against proliferative and/or cancerous polynucleotides and polypeptides. Such a kit may include a control antibody that does not react with the polypeptide of interest. Such a kit may include a substantially isolated polypeptide antigen comprising an epitope which is specifically immunoreactive with at least one anti-polypeptide antigen antibody. Further, such a kit includes means for detecting the binding of said antibody to the antigen (e.g., the antibody may be conjugated to a fluorescent compound such as fluorescein or rhodamine which can be detected by flow cytometry). In specific embodiments, the kit may include a recombinantly produced or chemically synthesized polypeptide antigen. The polypeptide antigen of the kit may also be attached to a solid support.

[0292] In a more specific embodiment the detecting means of the above-described kit includes a solid support to which said polypeptide antigen is attached. Such a kit may also include a non-attached reporter-labeled anti-human antibody. In this embodiment, binding of the antibody to the polypeptide antigen can be detected by binding of the said reporter-labeled antibody.

[0293] In an additional embodiment, the invention includes a diagnostic kit for use in screening serum containing antigens of the polypeptide of the invention. The diagnostic kit includes a substantially isolated antibody specifically immunoreactive with polypeptide or polynucleotide antigens, and means for detecting the binding of the polynucleotide or polypeptide antigen to the antibody. In one embodiment, the antibody is attached to a solid support. In a specific embodiment, the antibody may be a monoclonal antibody. The detecting means of the kit may include a second, labeled monoclonal antibody. Alternatively, or in addition, the detecting means may include a labeled, competing antigen.

[0294] In one diagnostic configuration, test serum is reacted with a solid phase reagent having a surface-bound antigen obtained by the methods of the present invention. After binding with specific antigen antibody to the reagent and removing unbound serum components by washing, the reagent is reacted with reporter-labeled anti-human antibody to bind reporter to the reagent in proportion to the amount of bound anti-antigen antibody on the solid support. The reagent is again washed to remove unbound labeled antibody, and the amount of reporter associated with the reagent is determined. Typically, the reporter is an enzyme which is detected by incubating the solid phase in the presence of a suitable fluorometric, luminescent or calorimetric substrate (Sigma, St. Louis, Mo.).

[0295] The solid surface reagent in the above assay is prepared by known techniques for attaching protein material to solid support material, such as polymeric beads, dip sticks, 96-well plate or filter material. These attachment methods generally include non-specific adsorption of the protein to the support or covalent attachment of the protein, typically through a free amine group, to a chemically reactive group on the solid support, such as an activated carboxyl, hydroxyl, or aldehyde group. Alternatively, streptavidin coated plates can be used in conjunction with biotinylated antigen(s).

[0296] Thus, the invention provides an assay system or kit for carrying out this diagnostic method. The kit generally includes a support with surface-bound recombinant antigens, and a reporter-labeled anti-human antibody for detecting surface-bound anti-antigen antibody.

[0297] Albumin Fusion Proteins

[0298] The present invention relates generally to albumin fusion proteins and methods of treating, preventing, or ameliorating diseases or disorders. As used herein, “albumin fusion protein” refers to a protein formed by the fusion of at least one molecule of albumin (or a fragment or variant thereof) to at least one molecule of a Therapeutic protein (or fragment or variant thereof). An albumin fusion protein of the invention comprises at least a fragment or variant of a Therapeutic protein and at least a fragment or variant of human serum albumin, which are associated with one another, preferably by genetic fusion (i.e., the albumin fusion protein is generated by translation of a nucleic acid in which a polynucleotide encoding all or a portion of a Therapeutic protein is joined in-frame with a polynucleotide encoding all or a portion of albumin) or to one another. The Therapeutic protein and albumin protein, once part of the albumin fusion protein, may each be referred to as a “portion”, “region” or “moiety” of the albumin fusion protein.

[0299] In a preferred embodiment, the invention provides an albumin fusion protein encoded by a polynucleotide or albumin fusion construct described in Table 1 or Table 2. Polynucleotides encoding these albumin fusion proteins are also encompassed by the invention.

[0300] Preferred albumin fusion proteins of the invention, include, but are not limited to, albumin fusion proteins encoded by a nucleic acid molecule comprising, or alternatively consisting of, a polynucleotide encoding at least one molecule of albumin (or a fragment or variant thereof) joined in frame to at least one polynucleotide encoding at least one molecule of a Therapeutic protein (or fragment or variant thereof); a nucleic acid molecule comprising, or alternatively consisting of, a polynucleotide encoding at least one molecule of albumin (or a fragment or variant thereof) joined in frame to at least one polynucleotide encoding at least one molecule of a Therapeutic protein (or fragment or variant thereof) generated as described in Table 1, Table 2 or in the Examples; or a nucleic acid molecule comprising, or alternatively consisting of, a polynucleotide encoding at least one molecule of albumin (or a fragment or variant thereof) joined in frame to at least one polynucleotide encoding at least one molecule of a Therapeutic protein (or fragment or variant thereof), further comprising, for example, one or more of the following elements: (1) a functional self-replicating vector (including but not limited to, a shuttle vector, an expression vector, an integration vector, and/or a replication system), (2) a region for initiation of transcription (e.g., a promoter region, such as for example, a regulatable or inducible promoter, a constitutive promoter), (3) a region for termination of transcription, (4) a leader sequence, and (5) a selectable marker.

[0301] In one embodiment, the invention provides an albumin fusion protein comprising, or alternatively consisting of, a Therapeutic protein (e.g., as described in Table 1) and a serum albumin protein. In other embodiments, the invention provides an albumin fusion protein comprising, or alternatively consisting of, a biologically active and/or therapeutically active fragment of a Therapeutic protein and a serum albumin protein. In other embodiments, the invention provides an albumin fusion protein comprising, or alternatively consisting of, a biologically active and/or therapeutically active variant of a Therapeutic protein and a serum albumin protein. In preferred embodiments, the serum albumin protein component of the albumin fusion protein is the mature portion of serum albumin.

[0302] In further embodiments, the invention provides an albumin fusion protein comprising, or alternatively consisting of, a Therapeutic protein, and a biologically active and/or therapeutically active fragment of serum albumin. In further embodiments, the invention provides an albumin fusion protein comprising, or alternatively consisting of, a Therapeutic protein and a biologically active and/or therapeutically active variant of serum albumin. In preferred embodiments, the Therapeutic protein portion of the albumin fusion protein is the mature portion of the Therapeutic protein.

[0303] In further embodiments, the invention provides an albumin fusion protein comprising, or alternatively consisting of, a biologically active and/or therapeutically active fragment or variant of a Therapeutic protein and a biologically active and/or therapeutically active fragment or variant of serum albumin. In preferred embodiments, the invention provides an albumin fusion protein comprising, or alternatively consisting of, the mature portion of a Therapeutic protein and the mature portion of serum albumin.

[0304] Preferably, the albumin fusion protein comprises HA as the N-terminal portion, and a Therapeutic protein as the C-terminal portion. Alternatively, an albumin fusion protein comprising HA as the C-terminal portion, and a Therapeutic protein as the N-terminal portion may also be used.

[0305] In other embodiments, the albumin fusion protein has a Therapeutic protein fused to both the N-terminus and the C-terminus of albumin. In a preferred embodiment, the Therapeutic proteins fused at the N- and C-termini are the same Therapeutic proteins. In an alternative preferred embodiment, the Therapeutic proteins fused at the N- and C-termini are different Therapeutic proteins. In another preferred embodiment, the Therapeutic proteins fused at the N- and C-termini are different Therapeutic proteins which may be used to treat or prevent the same or a related disease, disorder, or condition (e.g. as listed in the “Preferred Indication Y” column of Table 1). In another preferred embodiment, the Therapeutic proteins fused at the N- and C-termini are different Therapeutic proteins which may be used to treat, ameliorate, or prevent diseases or disorders (e.g. as listed in the “Preferred Indication Y” column of Table 1) which are known in the art to commonly occur in patients simultaneously, concurrently, or consecutively, or which commonly occur in patients in association with one another.

[0306] Albumin fusion proteins of the invention encompass proteins containing one, two, three, four, or more molecules of a given Therapeutic protein X or variant thereof fused to the N- or C-terminus of an albumin fusion protein of the invention, and/or to the N- and/or C-terminus of albumin or variant thereof. Molecules of a given Therapeutic protein X or variants thereof may be in any number of orientations, including, but not limited to, a ‘head to head’ orientation (e.g., wherein the N-terminus of one molecule of a Therapeutic protein X is fused to the N-terminus of another molecule of the Therapeutic protein X), or a ‘head to tail’ orientation (e.g., wherein the C-terminus of one molecule of a Therapeutic protein X is fused to the N-terminus of another molecule of Therapeutic protein X).

[0307] In one embodiment, one, two, three, or more tandemly oriented Therapeutic protein X polypeptides (or fragments or variants thereof) are fused to the N- or C-terminus of an albumin fusion protein of the invention, and/or to the N- and/or C-terminus of albumin or variant thereof.

[0308] Albumin fusion proteins of the invention further encompass proteins containing one, two, three, four, or more molecules of a given Therapeutic protein X or variant thereof fused to the N- or C-terminus of an albumin fusion protein of the invention, and/or to the N- and/or C-terminus of albumin or variant thereof, wherein the molecules are joined through peptide linkers. Examples include those peptide linkers described in U.S. Pat. No. 5,073,627 (hereby incorporated by reference). Albumin fusion proteins comprising multiple Therapeutic protein X polypeptides separated by peptide linkers may be produced using conventional recombinant DNA technology. Linkers are particularly important when fusing a small peptide to the large HSA molecule. The peptide itself can be a linker by fusing tandem copies of the peptide or other known linkers can be used. Constructs that incorporate linkers are described in Table 2 or are apparent when examining SEQ ID NO:Y.

[0309] Further, albumin fusion proteins of the invention may also be produced by fusing a Therapeutic protein X or variants thereof to the N-terminal and/or C-terminal of albumin or variants thereof in such a way as to allow the formation of intramolecular and/or intermolecular multimeric forms. In one embodiment of the invention, albumin fusion proteins may be in monomeric or multimeric forms (i.e., dimers, trimers, tetramers and higher multimers). In a further embodiment of the invention, the Therapeutic protein portion of an albumin fusion protein may be in monomeric form or multimeric form (i.e., dimers, trimers, tetramers and higher multimers). In a specific embodiment, the Therapeutic protein portion of an albumin fusion protein is in multimeric form (i.e., dimers, trimers, tetramers and higher multimers), and the albumin protein portion is in monomeric form.

[0310] In addition to albumin fusion protein in which the albumin portion is fused N-terminal and/or C-terminal of the Therapeutic protein portion, albumin fusion proteins of the invention may also be produced by inserting the Therapeutic protein or peptide of interest (e.g., a Therapeutic protein X as disclosed in Table 1, or an antibody that binds a Therapeutic protein or a fragment or variant thereof) into an internal region of HA. For instance, within the protein sequence of the HA molecule a number of loops or turns exist between the end and beginning of α-helices, which are stabilized by disulphide bonds. The loops, as determined from the crystal structure of HA (PDB identifiers 1AO6, 1BJ5, 1BKE, 1BM0, 1E7E to 1E7I and 1UOR) for the most part extend away from the body of the molecule. These loops are useful for the insertion, or internal fusion, of therapeutically active peptides, particularly those requiring a secondary structure to be functional, or Therapeutic proteins, to essentially generate an albumin molecule with specific biological activity.

[0311] Loops in human albumin structure into which peptides or polypeptides may be inserted to generate albumin fusion proteins of the invention include: Val54-Asn61, Thr76-Asp89, Ala92-Glu100, Gln170-Ala176, His 247-Glu252, Glu 266-Glu277, Glu 280-His288, Ala362-Glu368, Lys439-Pro447, Val462-Lys475, Thr478-Pro486, and Lys560-Thr566. In more preferred embodiments, peptides or polypeptides are inserted into the Val54-Asn61, Gln170-Ala176, and/or Lys560-Thr566 loops of mature human albumin (SEQ ID NO:1).

[0312] Peptides to be inserted may be derived from either phage display or synthetic peptide libraries screened for specific biological activity or from the active portions of a molecule with the desired function. Additionally, random peptide libraries may be generated within particular loops or by insertions of randomized peptides into particular loops of the HA molecule and in which all possible combinations of amino acids are represented.

[0313] Such library(s) could be generated on HA or domain fragments of HA by one of the following methods:

[0314] randomized mutation of amino acids within one or more peptide loops of HA or HA domain fragments. Either one, more or all the residues within a loop could be mutated in this manner;

[0315] replacement of, or insertion into one or more loops of HA or HA domain fragments (i.e., internal fusion) of a randomized peptide(s) of length Xₙ (where X is an amino acid and n is the number of residues;

[0316] N-, C- or N- and C-terminal peptide/protein fusions in addition to (a) and/or (b).

[0317] The HA or HA domain fragment may also be made multifunctional by grafting the peptides derived from different screens of different loops against different targets into the same HA or HA domain fragment.

[0318] In preferred embodiments, peptides inserted into a loop of human serum albumin are peptide fragments or peptide variants of the Therapeutic proteins disclosed in Table 1. More particularly, the invention encompasses albumin fusion proteins which comprise peptide fragments or peptide variants at least 7 at least 8, at least 9, at least 10, at least 11, at least 12, at least 13, at least 14, at least 15, at least 20, at least 25, at least 30, at least 35, or at least 40 amino acids in length inserted into a loop of human serum albumin. The invention also encompasses albumin fusion proteins which comprise peptide fragments or peptide variants at least 7 at least 8, at least 9, at least 10, at least 11, at least 12, at least 13, at least 14, at least 15, at least 20, at least 25, at least 30, at least 35, or at least 40 amino acids fused to the N-terminus of human serum albumin. The invention also encompasses albumin fusion proteins which comprise peptide fragments or peptide variants at least 7 at least 8, at least 9, at least 10, at least 11, at least 12, at least 13, at least 14, at least 15, at least 20, at least 25, at least 30, at least 35, or at least 40 amino acids fused to the C-terminus of human serum albumin. For example, short peptides described in Table 1 and 2 (e.g., Therapeutic Y) can be inserted into the albumin loops.

[0319] Generally, the albumin fusion proteins of the invention may have one HA-derived region and one Therapeutic protein-derived region. Multiple regions of each protein, however, may be used to make an albumin fusion protein of the invention. Similarly, more than one Therapeutic protein may be used to make an albumin fusion protein of the invention. For instance, a Therapeutic protein may be fused to both the N- and C-terminal ends of the HA. In such a configuration, the Therapeutic protein portions may be the same or different Therapeutic protein molecules. The structure of bifunctional albumin fusion proteins may be represented as: X-HA-Y or Y-HA-X.

[0320] For example, an anti-BLyS™ scFv-HA-IFNα-2b fusion may be prepared to modulate the immune response to IFNα-2b by anti-BLyS™ scFv. An alternative is making a bi (or even multi) functional dose of HA-fusions e.g. HA-IFNα-2b fusion mixed with HA-anti-BLyS™ scFv fusion or other HA-fusions in various ratio's depending on function, half-life etc.

[0321] Bi- or multi-functional albumin fusion proteins may also be prepared to target the Therapeutic protein portion of a fusion to a target organ or cell type via protein or peptide at the opposite terminus of HA.

[0322] As an alternative to the fusion of known therapeutic molecules, the peptides could be obtained by screening libraries constructed as fusions to the N-, C- or N- and C-termini of HA, or domain fragment of HA, of typically 6, 8, 12, 20 or 25 or Xₙ (where X is an amino acid (aa) and n equals the number of residues) randomized amino acids, and in which all possible combinations of amino acids were represented. A particular advantage of this approach is that the peptides may be selected in situ on the HA molecule and the properties of the peptide would therefore be as selected for rather than, potentially, modified as might be the case for a peptide derived by any other method then being attached to HA.

[0323] Additionally, the albumin fusion proteins of the invention may include a linker peptide between the fused portions to provide greater physical separation between the moieties and thus maximize the accessibility of the Therapeutic protein portion, for instance, for binding to its cognate receptor. The linker peptide may consist of amino acids such that it is flexible or more rigid.

[0324] The linker sequence may be cleavable by a protease or chemically to yield the growth hormone related moiety. Preferably, the protease is one which is produced naturally by the host, for example the S. cerevisiae protease kex2 or equivalent proteases.

[0325] Therefore, as described above, the albumin fusion proteins of the invention may have the following formula R1-L-R2; R2-L-R1; or R1-L-R2-L-R1, wherein R1 is at least one Therapeutic protein, peptide or polypeptide sequence, and not necessarily the same Therapeutic protein, L is a linker and R2 is a serum albumin sequence.

[0326] In preferred embodiments, albumin fusion proteins of the invention comprising a Therapeutic protein have a higher plasma stability compared to the plasma stability of the same Therapeutic protein when not fused to albumin. Plasma stability typically refers to the time period between when the Therapeutic protein is administered in vivo and carried into the bloodstream and when the therapeutic protein is degraded and cleared from the bloodstream, into an organ, such as the kidney or liver, that ultimately clears the Therapeutic protein from the body. Plasma stability is calculated in terms of the half-life of the Therapeutic protein in the bloodstream. The half-life of the Therapeutic protein in the bloodstream can be readily determined by common assays known in the art.

[0327] In preferred embodiments, Albumin fusion proteins of the invention comprising a Therapeutic protein have extended shelf life compared to the shelf life the same Therapeutic protein when not fused to albumin. Shelf-life typically refers to the time period over which the therapeutic activity of a Therapeutic protein in solution or in some other storage formulation, is stable without undue loss of therapeutic activity. Many of the Therapeutic proteins are highly labile in their unfused state. As described below, the typical shelf-life of these Therapeutic proteins is markedly prolonged upon incorporation into the albumin fusion protein of the invention.

[0328] Albumin fusion proteins of the invention with “prolonged” or “extended” shelf-life exhibit greater therapeutic activity relative to a standard that has been subjected to the same storage and handling conditions. The standard may be the unfused full-length Therapeutic protein. When the Therapeutic protein portion of the albumin fusion protein is an analog, a variant, or is otherwise altered or does not include the complete sequence for that protein, the prolongation of therapeutic activity may alternatively be compared to the unfused equivalent of that analog, variant, altered peptide or incomplete sequence. As an example, an albumin fusion protein of the invention may retain greater than about 100% of the therapeutic activity, or greater than about 105%, 110%, 120%, 130%, 150% or 200% of the therapeutic activity of a standard when subjected to the same storage and handling conditions as the standard when compared at a given time point.

[0329] Shelf-life may also be assessed in terms of therapeutic activity remaining after storage, normalized to therapeutic activity when storage began. Albumin fusion proteins of the invention with prolonged or extended shelf-life as exhibited by prolonged or extended therapeutic activity may retain greater than about 50% of the therapeutic activity, about 60%, 70%, 80%, or 90% or more of the therapeutic activity of the equivalent unfused Therapeutic protein when subjected to the same conditions.

[0330] Expression of Fusion Proteins

[0331] The albumin fusion proteins of the invention may be produced as recombinant molecules by secretion from yeast, a microorganism such as a bacterium, or a human or animal cell line. Preferably, the polypeptide is secreted from the host cells.

[0332] A particular embodiment of the invention comprises a DNA construct encoding a signal sequence effective for directing secretion in yeast, particularly a yeast-derived signal sequence (especially one which is homologous to the yeast host), and the fused molecule of the first aspect of the invention, there being no yeast-derived pro sequence between the signal and the mature polypeptide.

[0333] The Saccharomyces cerevisiae invertase signal is a preferred example of a yeast-derived signal sequence.

[0334] Conjugates of the kind prepared by Poznansky et al., (FEBS Lett. 239:18 (1988)), in which separately-prepared polypeptides are joined by chemical cross-linking, are not contemplated.

[0335] The present invention also includes a cell, preferably a yeast cell transformed to express an albumin fusion protein of the invention. In addition to the transformed host cells themselves, the present invention also contemplates a culture of those cells, preferably a monoclonal (clonally homogeneous) culture, or a culture derived from a monoclonal culture, in a nutrient medium. If the polypeptide is secreted, the medium will contain the polypeptide, with the cells, or without the cells if they have been filtered or centrifuged away. Many expression systems are known and may be used, including bacteria (for example E. coli and Bacillus subtilis), yeasts (for example Saccharomyces cerevisiae, Kluyveromyces lactis and Pichia pastoris, filamentous fungi (for example Aspergillus), plant cells, animal cells and insect cells.

[0336] Preferred yeast strains to be used in the production of albumin fusion proteins are D88, DXY1 and BXP10. D88 [leu2-3, leu2-122, can1, pra1, ubc4] is a derivative of parent strain AH22his⁺ (also known as DB1; see, e.g., Sleep et al. Biotechnology 8:42-46 (1990)). The strain contains a leu2 mutation which allows for auxotropic selection of 2 micron-based plasmids that contain the LEU2 gene. D88 also exhibits a derepression of PRB1 in glucose excess. The PRB1 promoter is normally controlled by two checkpoints that monitor glucose levels and growth stage. The promoter is activated in wild type yeast upon glucose depletion and entry into stationary phase. Strain D88 exhibits the repression by glucose but maintains the induction upon entry into stationary phase. The PRA1 gene encodes a yeast vacuolar protease, YscA endoprotease A, that is localized in the ER. The UBC4 gene is in the ubiquitination pathway and is involved in targeting short lived and abnormal proteins for ubiquitin dependant degradation. Isolation of this ubc4 mutation was found to increase the copy number of an expression plasmid in the cell and cause an increased level of expression of a desired protein expressed from the plasmid (see, e.g., International Publication No. WO99/00504, hereby incorporated in its entirety by reference herein).

[0337] DXY1, a derivative of D88, has the following genotype: [leu2-3, leu2-122, can1, pra1, ubc4, ura3::yap3]. In addition to the mutations isolated in D88, this strain also has a knockout of the YAP3 protease. This protease causes cleavage of mostly di-basic residues (RR, RR, KR, KK) but can also promote cleavage at single basic residues in proteins. Isolation of this yap3 mutation resulted in higher levels of full length HSA production (see, e.g., U.S. Pat. No. 5,965,386 and Kerry-Williams et al., Yeast 14:161-169 (1998), hereby incorporated in their entireties by reference herein).

[0338] BXP10 has the following genotype: leu2-3, leu2-122, can1, pra1, ubc4, ura3, yap3::URA3, lys2, hsp150::LYS2, pmt1::URA3. In addition to the mutations isolated in DXY1, this strain also has a knockout of the PMT1 gene and the HSP150 gene. The PMT1 gene is a member of the evolutionarily conserved family of dolichyl-phosphate-D-mannose protein O-mannosyltransferases (Pmts). The transmembrane topology of Pmt1p suggests that it is an integral membrane protein of the endoplasmic reticulum with a role in O-linked glycosylation. This mutation serves to reduce/eliminate O-linked glycosylation of HSA fusions (see, e.g., International Publication No. WO00/44772, hereby incorporated in its entirety by reference herein). Studies revealed that the Hsp150 protein is inefficiently separated from rHA by ion exchange chromatography. The mutation in the HSP150 gene removes a potential contaminant that has proven difficult to remove by standard purification techniques. See, e.g., U.S. Pat. No. 5,783,423, hereby incorporated in its entirety by reference herein.

[0339] The desired protein is produced in conventional ways, for example from a coding sequence inserted in the host chromosome or on a free plasmid. The yeasts are transformed with a coding sequence for the desired protein in any of the usual ways, for example electroporation. Methods for transformation of yeast by electroporation are disclosed in Becker & Guarente (1990) Methods Enzymol. 194, 182.

[0340] Successfully transformed cells, i.e., cells that contain a DNA construct of the present invention, can be identified by well known techniques. For example, cells resulting from the introduction of an expression construct can be grown to produce the desired polypeptide. Cells can be harvested and lysed and their DNA content examined for the presence of the DNA using a method such as that described by Southern (1975) J. Mol. Biol. 98, 503 or Berent et al. (1985) Biotech. 3, 208. Alternatively, the presence of the protein in the supernatant can be detected using antibodies.

[0341] Useful yeast plasmid vectors include pRS403-406 and pRS413-416 and are generally available from Stratagene Cloning Systems, La Jolla, Calif. 92037, USA. Plasmids pRS403, pRS404, pRS405 and pRS406 are Yeast Integrating plasmids (YIps) and incorporate the yeast selectable markers HIS3, 7RP1, LEU2 and URA3. Plasmids pRS413-416 are Yeast Centromere plasmids (Ycps).

[0342] Preferred vectors for making albumin fusion proteins for expression in yeast include pPPC0005, pScCHSA, pScNHSA, and pC4:HSA which are described in detail in Example 1. FIG. 2 shows a map of the pPPC0005 plasmid that can be used as the base vector into which polynucleotides encoding Therapeutic proteins may be cloned to form HA-fusions. It contains a PRB1 S. cerevisiae promoter (PRB1p), a Fusion leader sequence (FL), DNA encoding HA (rHA) and an ADH1 S. cerevisiae terminator sequence. The sequence of the fusion leader sequence consists of the first 19 amino acids of the signal peptide of human serum albumin (SEQ ID NO:3) and the last five amino acids of the mating factor alpha 1 promoter (SLDKR, see EP-A-387 319 which is hereby incorporated by reference in its entirety).

[0343] The plasmids, pPPC0005, pScCHSA, pScNHSA, and pC4:HSA were deposited on Apr. 11, 2001 at the American Type Culture Collection, 10801 University Boulevard, Manassas, Va. 20110-2209 and given accession numbers ATCC PTA-3278, PTA-3276, PTA-3279, and PTA-3277, respectively. Another vector useful for expressing an albumin fusion protein in yeast the pSAC35 vector which is described in Sleep et al., BioTechnology 8:42 (1990) which is hereby incorporated by reference in its entirety.

[0344] A yeast promoter that can be used to express the albumin fusion protein is the MET25 promoter. See, for example, Dominik Mumburg, Rolf Muller and Martin Funk. Nucleic Acids Research, 1994, Vol. 22, No. 25, pp. 5767-5768. The Met25 promoter is 383 bases long (bases-382 to −1) and the genes expressed by this promoter are also known as Met15, Met17, and YLR303W. A preferred embodiment uses the sequence below, where, at the 5′ end of the sequence below, the Not 1 site used in the cloning is underlined and at the 3′ end, the ATG start codon is underlined:

(SEQ ID NO: 5)

GCGGCCGCCGGATGCAAGGGTTCGAATCCCTTAGCTCTCATTATTTTTTG
CTTTTTCTCTTGAGGTCACATGATCGCAAAATGGCAAATGGCACGTGAAG
CTGTCGATATTGGGGAACTGTGGTGGTTGGCAAATGACTAATTAAGTTAG
TCAAGGCGCCATCCTCATGAAAACTGTGTAACATAATAACCGAAGTGTCG
AAAAGGTGGCACCTTGTCCAATTGAACACGCTCGATGAAAAAAATAAGAT
ATATATAAGGTTAAGTAAAGCGTCTGTTAGAAAGGAAGTTTTTCCTTTTT
CTTGCTCTCTTGTCTTTTCATCTACTATTTCCTTCGTGTAATACAGGGTC
GTCAGATACATAGATACAATTCTATTACCCCCATCCATACAATG

[0345] Additional promoters that can be used to express the albumin fusion protein in yeast include the following:

[0346] a) the cbh1 promoter:

(SEQ ID NO: 113)

TCTAGAGTTGTGAAGTCGGTAATCCCGCTGTATAGTAATACGAGTCGCAT
CTAAATACTCCGAAGCTGCTGCGAACCCGGAGAATCGAGATGTGCTGGAA
AGCTTCTAGCGAGCGGCTAAATTAGCATGAAAGGCTATGAGAAATTCTGG
AGACGGCTTGTTGAATCATGGCGTTCCATTCTTCGACAAGCAAAGCGTTC
CGTCGCAGTAGCAGGCACTCATTCCCGAAAAAACTCGGAGATTCCTAAGT
AGCGATGGAACCGGAATAATATAATAGGCAATACATTGAGTTGCCTCGAC
GGTTGCAATGCAGGGGTACTGAGCTTGGACATAACTGTTCCGTACCCCAC
CTCTTCTCAACCTTTGGCGTTTCCCTGATTCAGCGTACCCGTACAAGTCG
TAATCACTATTAACCCAGACTGACCGGACGTGTTTTGCCCTTCATTTGGA
GAAATAATGTCATTGCGATGTGTAATTTGCCTGCTTGACCGACTGGGGCT
GTTCGAAGCCCGAATGTAGGATTGTTATCCGAACTCTGCTCGTAGAGGCA
TGTTGTGAATCTGTGTCGGGCAGGACACGCCTCGAAGGTTCACGGCAAGG
GAAACCACCGATAGCAGTGTCTAGTAGCAACCTGTAAAGCCGCAATGCAG
CATCACTGGAAAATACAAACCAATGGCTAAAAGTACATAAGTTAATGCCT
AAAGAAGTCATATACCAGCGGCTAATAATTGTACAATCAAGTGGCTAAAC
GTACCGTAATTTGCCAACGGCTTGTGGGGTTGCAGAAGCAACGGCAAAGC
CCCACTTCCCCACGTTTGTTTCTTCACTCAGTCCAATCTCAGCTGGTGAT
CCCCCAATTGGGTCGCTTGTTTGTTCCGGTGAAGTGAAAGAAGACAGAGG
TAAGAATGTCTGACTCGGAGCGTTTTGCATACAACCAAGGGCAGTGATGG
AAGACAGTGAAATGTTGACATTCAAGGAGTATTTAGCCAGGGATGCTTGA
GTGTATCGTGTAAGGAGGTTTGTCTGCCGATACGACGAATACTGTATAGT
CACTTCTGGTGAAGTGGTCCATATTGAAATGTAAGTCGGCACTGAACAGG
CAAAAGATTGAGTTGAAACTGCCTAAGATCTCGGGCCCTCGGGCCTTCGG
CCTTTGGGTGTACATGTTTGTGCTCCGGGCAAATGCAAAGTGTGGTAGGA
TCGAACACACTGCTGCCTTTACCAAGCAGCTGAGGGTATGTGATAGGCAA
ATGTTCAGGGGCCACTGCATGGTTTCGAATAGAAAGAGAAGCTTAGCCAA
GAACAATAGCCGATAAAGATAGCCTCATTAAACGGAATGAGCTAGTAGGC
AAAGTCAGCGAATGTGTATATATAAAGGTTCGAGGTCCGTGCCTCCCTCA
TGCTCTCCCCATCTACTCATCAACTCAGATCCTCCAGGAGACTTGTACAC
CATCTTTTGAGGCACAGAAACCCAATAGTCAACCGCGGACTGGCATC

[0347] b) the cysD promoter from Aspergillus nidulans:

(SEQ ID NO: 114)

AGATCTGGTTCCTGAGTACATCTACCGATGCGCCTCGATCCCCCTCTTAG
CCGCATGAGATTCCTACCATTTATGTCCTATCGTTCAGGGTCCTATTTGG
ACCGCTAGAAATAGACTCTGCTCGATTTGTTTCCATTATTCACGCAATTA
CGATAGTATTTGGCTCTTTTCGTTTGGCCCAGGTCAATTCGGGTAAGACG
CGATCACGCCATTGTGGCCGCCGGCGTTGTGCTGCTGCTATTCCCCGCAT
ATAAACAACCCCTCCACCAGTTCGTTGGGCTTTGCGAATGCTGTACTCTA
TTTCAAGTTGTCAAAAGAGAGGATTCAAAAAATTATACCCCAGATATCAA
AGATATCAAAGCCATC

[0348] c) a modified cbh1 promoter having the sequence:

(SEQ ID NO: 115)

TCTAGAGTTGTGAAGTCGGTAATCCCGCTGTATAGTAATACGAGTCGCAT
CTAAATACTCCGAAGCTGCTGCGAACCCGGAGAATCGAGATGTGCTGGAA
AGCTTCTAGCGAGCGGCTAAATTAGCATGAAAGGCTATGAGAAATTCTGG
AGACGGCTTGTTGAATCATGGCGTTCCATTCTTCGACAAGCAAAGCGTTC
CGTCGCAGTAGCAGGCACTCATTCCCGAAAAAACTCGGAGATTCCTAAGT
AGCGATGGAACCGGAATAATATAATAGGCAATACATTGAGTTGCCTCGAC
GGTTGCAATGCAGGGGTACTGAGCTTGGACATAACTGTTCCGTACCCCAC
CTCTTCTCAACCTTTGGCGTTTCCCTGATTCAGCGTACCCGTACAAGTCG
TAATCACTATTAACCCAGACTGACCGGACGTGTTTTGCCCTTCATTTGGA
GAAATAATGTCATTGCGATGTGTAATTTGCCTGCTTGACCGACTGGGGCT
GTTCGAAGCCCGAATGTAGGATTGTTATCCGAACTCTGCTCGTAGAGGCA
TGTTGTGAATCTGTGTCGGGCAGGACACGCCTCGAAGGTTCACGGCAAGG
GAAACCACCGATAGCAGTGTCTAGTAGCAACCTGTAAAGCCGCAATGCAG
CATCACTGGAAAATACAAACCAATGGCTAAAAGTACATAAGTTAATGCCT
AAAGAAGTCATATACCAGCGGCTAATAATTGTACAATCAAGTGGCTAAAC
GTACCGTAATTTGCCAACGGCTTGTGGGGTTGCAGAAGCAACGGCAAAGC
CCCACTTCCCCACGTTTGTTTCTTCACTCAGTCCAATCTCAGCTGGTGAT
CCCCCAATTGGGTCGCTTGTTTGTTCCGGTGAAGTGAAAGAAGACAGAGG
TAAGAATGTCTGACTCGGAGCGTTTTGCATACAACCAAGGGCAGTGATGG
AAGACAGTGAAATGTTGACATTCAAGGAGTATTTAGCCAGGGATGCTTGA
GTGTATCGTGTAAGGAGGTTTGTCTGCCGATACGACGAATACTGTATAGT
CACTTCTGGTGAAGTGGTCCATATTGAAATGTAAGTCGGCACTGAACAGG
CAAAAGATTGAGTTGAAACTGCCTAAGATCTCGGGCCCTCGGGCCTTCGG
CCTTTGGGTGTACATGTTTGTGCTCCGGGCAAATGCAAAGTGTGGTAGGA
TCGAACACACTGCTGCCTTTACCAAGCAGCTGAGGGTATGTGATAGGCAA
ATGTTCAGGGGCCACTGCATGGTTTCGAATAGAAAGAGAAGCTTAGCCTG
CAGCCTCTTATCGAGAAAGAAATTACCGTCGCTCGTGATTTGTTTGCAAA
AAGAACAAAACTGAAAAAACCCAGACACGCTCGACTTCCTGTCTTCCTAT
TGATTGCAGCTTCCAATTTCGTCACACAACAAGGTCCTAGCTTAGCCAAG
AACAATAGCCGATAAAGATAGCCTCATTAAACGGAATGAGCTAGTAGGCA
AAGTCAGCGAATGTGTATATATAAAGGTTCGAGGTCCGTGCCTCCCTCAT
GCTCTCCCCATCTACTCATCAACTCAGATCCTCCAGGAGACTTGTACACC
ATCTTTTGAGGCACAGAAACCCAATAGTCAACCGCGGACTGGCATC

[0349] d) a cysD promoter from Aspergillus nidulans having the sequence:

(SEQ ID NO: 116)

AGATCTGGTTCCTGAGTACATCTACCGATGCGCCTCGATCCCCCTCTTAG
CCGCATGAGATTCCTACCATTTATGTCCTATCGTTCAGGGTCCTATTTGG
ACCGCTAGAAATAGACTCTGCTCGATTTGTTTCCATTATTCACGCAATTA
CGATAGTATTTGGCTCTTTTCGTTTGGCCCAGGTCAATTCGGGTAAGACG
CGATCACGCCATTGTGGCCGCCGGCGCTGCAGCCTCTTATCGAGAAAGAA
ATTACCGTCGCTCGTGATTTGTTTGCAAAAAGAACAAAACTGAAAAAACC
CAGACACGCTCGACTTCCTGTCTTCCTATTGATTGCAGCTTCCAATTTCG
TCACACAACAAGGTCCTACGCCGGCGTTGTGCTGCTGCTATTCCCCGCAT
ATAAACAACCCCTCCACCAGTTCGTTGGGCTTTGCGAATGCTGTACTCTA
TTTCAAGTTGTCAAAAGAGAGGATTCAAAAAATTATACCCCAGATATCAA
AGATATCAAAGCCATC

[0350] A variety of methods have been developed to operably link DNA to vectors via complementary cohesive termini. For instance, complementary homopolymer tracts can be added to the DNA segment to be inserted to the vector DNA. The vector and DNA segment are then joined by hydrogen bonding between the complementary homopolymeric tails to form recombinant DNA molecules.

[0351] Synthetic linkers containing one or more restriction sites provide an alternative method of joining the DNA segment to vectors. The DNA segment, generated by endonuclease restriction digestion, is treated with bacteriophage T4 DNA polymerase or E. coli DNA polymerase I, enzymes that remove protruding, gamma-single-stranded termini with their 3′ 5′-exonucleolytic activities, and fill in recessed 3′-ends with their polymerizing activities.

[0352] The combination of these activities therefore generates blunt-ended DNA segments. The blunt-ended segments are then incubated with a large molar excess of linker molecules in the presence of an enzyme that is able to catalyze the ligation of blunt-ended DNA molecules, such as bacteriophage T4 DNA ligase. Thus, the products of the reaction are DNA segments carrying polymeric linker sequences at their ends. These DNA segments are then cleaved with the appropriate restriction enzyme and ligated to an expression vector that has been cleaved with an enzyme that produces termini compatible with those of the DNA segment.

[0353] Synthetic linkers containing a variety of restriction endonuclease sites are commercially available from a number of sources including International Biotechnologies Inc, New Haven, Conn., USA.

[0354] A desirable way to modify the DNA in accordance with the invention, if, for example, HA variants are to be prepared, is to use the polymerase chain reaction as disclosed by Saiki et al. (1988) Science 239, 487-491. In this method the DNA to be enzymatically amplified is flanked by two specific oligonucleotide primers which themselves become incorporated into the amplified DNA. The specific primers may contain restriction endonuclease recognition sites which can be used for cloning into expression vectors using methods known in the art.

[0355] Exemplary genera of yeast contemplated to be useful in the practice of the present invention as hosts for expressing the albumin fusion proteins are Pichia (Hansenula), Saccharomyces, Kluyveromyces, Candida, Torulopsis, Torulaspora, Schizosaccharomyces, Citeromyces, Pachysolen, Debaromyces, Metschunikowia, Rhodosporidium, Leucosporidium, Botryoascus, Sporidiobolus, Endomycopsis, and the like. Preferred genera are those selected from the group consisting of Saccharomyces, Schizosaccharomyces, Kluyveromyces, Pichia and Torulaspora. Examples of Saccharomyces spp. are S. cerevisiae, S. italicus and S. rouxii.

[0356] Examples of Kluyveromyces spp. are K. fragilis, K. lactis and K. marxianus. A suitable Torulaspora species is T. delbrueckii. Examples of Pichia (Hansenula) spp. are P. angusta (formerly H. polymorpha), P. anomala (formerly H. anomala) and P. pastoris. Methods for the transformation of S. cerevisiae are taught generally in EP 251 744, EP 258 067 and WO 90/01063, all of which are incorporated herein by reference.

[0357] Preferred exemplary species of Saccharomyces include S. cerevisiae, S. italicus, S. diastaticus, and Zygosaccharomyces rouxii. Preferred exemplary species of Kluyveromyces include K. fragilis and K. lactis. Preferred exemplary species of Hansenula include H. polymorpha (now Pichia angusta), H. anomala (now Pichia anomala), and Pichia capsulata. Additional preferred exemplary species of Pichia include P. pastoris. Preferred exemplary species of Aspergillus include A. niger and A. nidulans. Preferred exemplary species of Yarrowia include Y. lipolytica. Many preferred yeast species are available from the ATCC. For example, the following preferred yeast species are available from the ATCC and are useful in the expression of albumin fusion proteins: Saccharomyces cerevisiae Hansen, teleomorph strain BY4743 yap3 mutant (ATCC Accession No. 4022731); Saccharomyces cerevisiae Hansen, teleomorph strain BY4743 hsp150 mutant (ATCC Accession No. 4021266); Saccharomyces cerevisiae Hansen, teleomorph strain BY4743 pmt1 mutant (ATCC Accession No. 4023792); Saccharomyces cerevisiae Hansen, teleomorph (ATCC Accession Nos. 20626; 44773; 44774; and 62995); Saccharomyces diastaticus Andrews et Gilliland ex van der Walt, teleomorph (ATCC Accession No. 62987); Kluyveromyces lactis (Dombrowski) van der Walt, teleomorph (ATCC Accession No. 76492); Pichia angusta (Teunisson et al.) Kurtzman, teleomorph deposited as Hansenula polymorpha de Morais et Maia, teleomorph (ATCC Accession No. 26012); Aspergillus niger van Tieghem, anamorph (ATCC Accession No. 9029); Aspergillus niger van Tieghem, anamorph (ATCC Accession No. 16404); Aspergillus nidulans (Eidam) Winter, anamorph (ATCC Accession No. 48756); and Yarrowia lipolytica (Wickerham et al.) van der Walt et von Arx, teleomorph (ATCC Accession No. 201847).

[0358] Suitable promoters for S. cerevisiae include those associated with the PGKI gene, GAL1 or GAL10 genes, CYCI, PHO5, TRPI, ADHI, ADH2, the genes for glyceraldehyde-3-phosphate dehydrogenase, hexokinase, pyruvate decarboxylase, phosphofructokinase, triose phosphate isomerase, phosphoglucose isomerase, glucokinase, alpha-mating factor pheromone, [a mating factor pheromone], the PRBI promoter, the GUT2 promoter, the GPDI promoter, and hybrid promoters involving hybrids of parts of 5′ regulatory regions with parts of 5′ regulatory regions of other promoters or with upstream activation sites (e.g. the promoter of EP-A-258 067).

[0359] Convenient regulatable promoters for use in Schizosaccharomyces pombe are the thiamine-repressible promoter from the nmt gene as described by Maundrell (1990) J. Biol. Chem. 265, 10857-10864 and the glucose repressible jbpl gene promoter as described by Hoffman & Winston (1990) Genetics 124, 807-816.

[0360] Methods of transforming Pichia for expression of foreign genes are taught in, for example, Cregg et al. (1993), and various Phillips patents (e.g. U.S. Pat. No. 4,857,467, incorporated herein by reference), and Pichia expression kits are commercially available from Invitrogen BV, Leek, Netherlands, and Invitrogen Corp., San Diego, Calif. Suitable promoters include AOXI and AOX2. Gleeson et al. (1986) J. Gen. Microbiol. 132, 3459-3465 include information on Hansenula vectors and transformation, suitable promoters being MOX1 and FMD1; whilst EP 361 991, Fleer et al. (1991) and other-publications from Rhone-Poulenc Rorer teach how to express foreign proteins in Kluyveromyces spp., a suitable promoter being PGKI.

[0361] The transcription termination signal is preferably the 3′ flanking sequence of a eukaryotic gene which contains proper signals for transcription termination and polyadenylation. Suitable 3′ flanking sequences may, for example, be those of the gene naturally linked to the expression control sequence used, i.e. may correspond to the promoter. Alternatively, they may be different in which case the termination signal of the S. cerevisiae ADHI gene is preferred.

[0362] The desired albumin fusion protein may be initially expressed with a secretion leader sequence, which may be any leader effective in the yeast chosen. Leaders useful in yeast include any of the following:
[0363] a) the MPIF-1 signal sequence (e.g., amino acids 1-21 of GenBank Accession number AAB51134) MKVSVAALSCLMLVTALGSQA (SEQ ID NO:6)
[0364] b) the stanniocalcin signal sequence (MLQNSAVLLLLVISASA, SEQ ID NO:7)
[0365] c) the pre-pro region of the HSA signal sequence (e.g., MKWVTFISLLFLFSSAYSRGVFRR, SEQ ID NO:8)
[0366] d) the pre region of the HSA signal sequence (e.g., MKWVTFISLLFLFSSAYS, SEQ ID NO:9) or variants thereof, such as, for example, MKWVSFISLLFLFSSAYS, (SEQ ID NO: 10)
[0367] e) the invertase signal sequence (e.g., MLLQAFLFLLAGFAAKISA, SEQ ID NO:11)
[0368] f) the yeast mating factor alpha signal sequence (e.g., MRFPSIFTAVLAFAASSALAAPVNTTTEDETAQIPAEAVIGYSDLEGDFDVAVLPF SNSTNNGLLFINTTIASIAAKEEGVSLEKR, SEQ ID NO:12 or MRFPSIFTAVLAFAASSALAAPVNTTTEDETAQIPAEAVIGYSDLEGDFDVAVLPF SNSTNNGLLFINTTIASIAAKEEGVSLDKR, SEQ ID NO:12)
[0369] g) K lactis killer toxin leader sequence
[0370] h) a hybrid signal sequence (e.g., MKWVSFISLLFLFSSAYSRSLEKR, SEQ ID NO:13)
[0371] i) an HSA/MFα-1 hybrid signal sequence (also known as HSA/kex2) (e.g., MKWVSFISLLFLFSSAYSRSLDKR, SEQ ID NO:14)
[0372] j) a K. lactis killer/MFα-1 fusion leader sequence (e.g., MNIFYIFLFLLSFVQGSLDKR, SEQ ID NO:15)
[0373] k) the Immunoglobulin Ig signal sequence (e.g., MGWSCIILFLVATATGVHS, SEQ ID NO:16)
[0374] l) the Fibulin B precursor signal sequence (e.g., MERAAPSRRVPLPLLLLGGLALLAAGVDA, SEQ ID NO:17)
[0375] m) the clusterin precursor signal sequence (e.g., MMKTLLLFVGLLLTWESGQVLG, SEQ ID NO:18)
[0376] n) the insulin-like growth factor-binding protein 4 signal sequence (e.g., MLPLCLVAALLLAAGPGPSLG, SEQ ID NO:19)
[0377] o) variants of the pre-pro-region of the HSA signal sequence such as, for example, MKWVSFISLLFLFSSAYSRGVFRR (SEQ ID NO:20), MKWVTFISLLFLFAGVLG (SEQ ID NO:21), MKWVTFISLLFLFSGVLG (SEQ ID NO:22), MKWVTFISLLFLFGGVLG (SEQ ID NO:23),
   [0378] Modified HSA leader HSA #64—MKWVTFISLLFLFAGVSG (SEQ ID NO:24);
   [0379] Modified HSA leader HSA #66—MKWVTFISLLFLFGGVSG (SEQ ID NO:25);
   [0380] Modified HSA (A14) leader—MKWVTFISLLFLFAGVSG (SEQ ID NO:26);
   [0381] Modified HSA (S14) leader (also known as modified HSA #65)—
[0382] MKWVTFISLLFLFSGVSG (SEQ ID NO:27),
   [0383] Modified HSA (G14) leader—MKWVTFISLLFLFGGVSG (SEQ ID NO:28), or
   [0384] MKWVTFISLLFLFGGVLGDLHKS (SEQ ID NO:29)
[0385] p) a consensus signal sequence (MPTWAWWLFLVLLLALWAPARG, SEQ ID NO:30)
[0386] q) acid phosphatase (PH05) leader (e.g., MFKSVVYSILAASLANA SEQ ID NO:31)
[0387] r) the pre-sequence of MFoz-1
[0388] s) the pre-sequence of 0 glucanase (BGL2)
[0389] t) killer toxin leader
[0390] u) the presequence of killer toxin
[0391] v) k. lactis killer toxin prepro (29 amino acids; 16 amino acids of pre and 13 amino acids of pro) MNIFYIFLFLLSFVQGLEHTHRRGSLDKR (SEQ ID NO:32)
[0392] w) S. diastaticus glucoamylase Il secretion leader sequence
[0393] x) S. carlsbergensis β-galactosidase (MEL1) secretion leader sequence
[0394] y) Candida glucoamylase leader sequence
[0395] z) The hybrid leaders disclosed in EP-A-387 319 (herein incorporated by reference)
[0396] aa) the gp67 signal sequence (in conjunction with baculoviral expression systems) (e.g., amino acids 1-19 of GenBank Accession Number AAA72759) or
[0397] bb) the natural leader of the therapeutic protein X;
[0398] cc) S. cerevisiae invertase (SUC2) leader, as disclosed in JP 62-096086 (granted as 911036516, herein incorporate by reference); or
[0399] dd) Inulinase—MKLAYSLLLPLAGVSASVINYKR (SEQ ID NO:33).
[0400] ee) A modified TA57 propeptide leader variant #1—MKLKTVRSAVLSSLFASQVLGQPIDDTESQTTSVNLMADDTESAFATQTNSGGLD VVGLISMAKR (SEQ ID NO:34)
[0401] ff) A modified TA57 propeptide leader variant #2—MKLKTVRSAVLSSLFASQVLGQPIDDTESQTTSVNLMADDTESAFATQTNSGGLD VVGLISMAEEGEPKR (SEQ ID NO:35)
[0402] gg) A consensus signal peptide—MWWRLWWLLLLLLLLWPMVWA (SEQ ID NO:111)
[0403] hh) A modified HSA/kex2 signal sequence—MKWVSFISLLFLFSSAYSGSLDKR (SEQ ID NO:112)
[0404] ii) A consensus signal peptide #2—MRPTWAWWLFLVLLLALWAPARG (SEQ ID NO:105)

[0405] Additional Methods of Recombinant and Synthetic Production of Albumin Fusion Proteins

[0406] The present invention also relates to vectors containing a polynucleotide encoding an albumin fusion protein of the present invention, host cells, and the production of albumin fusion proteins by synthetic and recombinant techniques. The vector may be, for example, a phage, plasmid, viral, or retroviral vector. Retroviral vectors may be replication competent or replication defective. In the latter case, viral propagation generally will occur only in complementing host cells.

[0407] The polynucleotides encoding albumin fusion proteins of the invention may be joined to a vector containing a selectable marker for propagation in a host. Generally, a plasmid vector is introduced in a precipitate, such as a calcium phosphate precipitate, or in a complex with a charged lipid. If the vector is a virus, it may be packaged in vitro using an appropriate packaging cell line and then transduced into host cells.

[0408] The polynucleotide insert should be operatively linked to an appropriate promoter, such as the phage lambda PL promoter, the E. coli lac, trp, phoA and tac promoters, the SV40 early and late promoters and promoters of retroviral LTRs, to name a few. Other suitable promoters will be known to the skilled artisan. The expression constructs will further contain sites for transcription initiation, termination, and, in the transcribed region, a ribosome binding site for translation. The coding portion of the transcripts expressed by the constructs will preferably include a translation initiating codon at the beginning and a termination codon (UAA, UGA or UAG) appropriately positioned at the end of the polypeptide to be translated.

[0409] As indicated, the expression vectors will preferably include at least one selectable marker. Such markers include dihydrofolate reductase, G418, glutamine synthase, or neomycin resistance for eukaryotic cell culture, and tetracycline, kanamycin or ampicillin resistance genes for culturing in E. coli and other bacteria. Representative examples of appropriate hosts include, but are not limited to, bacterial cells, such as E. coli, Streptomyces and Salmonella typhimurium cells; fungal cells, such as yeast cells (e.g., Saccharomyces cerevisiae or Pichia pastoris (ATCC Accession No. 201178)); insect cells such as Drosophila S2 and Spodoptera Sf9 cells; animal cells such as CHO, COS, NSO, 293, and Bowes melanoma cells; and plant cells. Appropriate culture mediums and conditions for the above-described host cells are known in the art.

[0410] Among vectors preferred for use in bacteria include pQE70, pQE60 and pQE-9, available from QIAGEN, Inc.; pBluescript vectors, Phagescript vectors, pNH8A, pNH16a, pNH18A, pNH46A, available from Stratagene Cloning Systems, Inc.; and ptrc99a, pKK223-3, pKK233-3, pDR540, pRIT5 available from Pharmacia Biotech, Inc. Among preferred eukaryotic vectors are pWLNEO, pSV2CAT, pOG44, pXT1 and pSG available from Stratagene; and pSVK3, pBPV, pMSG and pSVL available from Pharmacia. Preferred expression vectors for use in yeast systems include, but are not limited to pYES2, pYD1, pTEF1/Zeo, pYES2/GS, pPICZ, pGAPZ, pGAPZalph, pPIC9, pPIC3.5, pHIL-D2, pHIL-S1, pPIC3.5K, pPIC9K, and PAO815 (all available from Invitrogen, Carlbad, Calif.). Other suitable vectors will be readily apparent to the skilled artisan.

[0411] In one embodiment, polynucleotides encoding an albumin fusion protein of the invention may be fused to signal sequences which will direct the localization of a protein of the invention to particular compartments of a prokaryotic or eukaryotic cell and/or direct the secretion of a protein of the invention from a prokaryotic or eukaryotic cell. For example, in E. coli, one may wish to direct the expression of the protein to the periplasmic space. Examples of signal sequences or proteins (or fragments thereof) to which the albumin fusion proteins of the invention may be fused in order to direct the expression of the polypeptide to the periplasmic space of bacteria include, but are not limited to, the pelB signal sequence, the maltose binding protein (MBP) signal sequence, MBP, the ompA signal sequence, the signal sequence of the periplasmic E. coli heat-labile enterotoxin B-subunit, and the signal sequence of alkaline phosphatase. Several vectors are commercially available for the construction of fusion proteins which will direct the localization of a protein, such as the pMAL series of vectors (particularly the pMAL-p series) available from New England Biolabs. In a specific embodiment, polynucleotides albumin fusion proteins of the invention may be fused to the pelB pectate lyase signal sequence to increase the efficiency of expression and purification of such polypeptides in Gram-negative bacteria. See, U.S. Pat. Nos. 5,576,195 and 5,846,818, the contents of which are herein incorporated by reference in their entireties.

[0412] Examples of signal peptides that may be fused to an albumin fusion protein of the invention in order to direct its secretion in mammalian cells include, but are not limited to:
[0413] a) the MPIF-1 signal sequence (e.g., amino acids 1-21 of GenBank Accession number AAB51134) MKVSVAALSCLMLVTALGSQA (SEQ ID NO:6)
[0414] b) the stanniocalcin signal sequence (MLQNSAVLLLLVISASA, SEQ ID NO:7)
[0415] c) the pre-pro region of the HSA signal sequence (e.g., MKWVTFISLLFLFSSAYSRGVFRR, SEQ ID NO:8)
[0416] d) the pre region of the HSA signal sequence (e.g., MKWVTFISLLFLFSSAYS, SEQ ID NO:9) or variants thereof, such as, for example, MKWVSFISLLFLFSSAYS, (SEQ ID NO:10)
[0417] e) the invertase signal sequence (e.g., MLLQAFLFLLAGFAAKISA, SEQ ID NO:11)
[0418] f) the yeast mating factor alpha signal sequence (e.g., MRFPSIFTAVLAFAASSALAAPVNTTTEDETAQIPAEAVIGYSDLEGDFDVAVLPF SNSTNNGLLFINTTIASIAAKEEGVSLEKR, SEQ ID NO:12 or MRFPSIFTAVLAFAASSALAAPVNTTTEDETAQIPAEAVIGYSDLEGDFDVAVLPF SNSTNNGLLFINTTIASIAAKEEGVSLDKR, SEQ ID NO:12)
[0419] g) K. lactis killer toxin leader sequence
[0420] h) a hybrid signal sequence (e.g., MKWVSFISLLFLFSSAYSRSLEKR, SEQ ID NO:13)
[0421] i) an HSA/MFα-1 hybrid signal sequence (also known as HSA/kex2) (e.g., MKWVSFISLLFLFSSAYSRSLDKR, SEQ ID NO:14)
[0422] j) a K. lactis killer/MFα-1 fusion leader sequence (e.g., MNIFYIFLFLLSFVQGSLDKR, SEQ ID NO:15)
[0423] k) the Immunoglobulin Ig signal sequence (e.g., MGWSCIILFLVATATGVHS, SEQ ID NO:16)
[0424] l) the Fibulin B precursor signal sequence (e.g., MERAAPSRRVPLPLLLLGGLALLAAGVDA, SEQ ID NO:17)
[0425] m) the clusterin precursor signal sequence (e.g., MMKTLLLFVGLLLTWESGQVLG, SEQ ID NO:18)
[0426] n) the insulin-like growth factor-binding protein 4 signal sequence (e.g., MLPLCLVAALLLAAGPGPSLG, SEQ ID NO:19)
[0427] o) variants of the pre-pro-region of the HSA signal sequence such as, for example, MKWVSFISLLFLFSSAYSRGVFRR (SEQ ID NO:20), MKWVTFISLLFLFAGVLG (SEQ ID NO:21), MKWVTFISLLFLFSGVLG (SEQ ID NO:22), MKWVTFISLLFLFGGVLG (SEQ ID NO:23),
   [0428] Modified HSA leader HSA #64—MKWVTFISLLFLFAGVSG (SEQ ID NO:24);
   [0429] Modified HSA leader HSA #66—MKWVTFISLLFLFGGVSG (SEQ ID NO:25);
   [0430] Modified HSA (A 14) leader—MKWVTFISLLFLFAGVSG (SEQ ID NO:26);
   [0431] Modified HSA (S14) leader (also known as modified HSA #65)—
   [0432] MKWVTFISLLFLFSGVSG (SEQ ID NO:27),
   [0433] Modified HSA (G14) leader—MKWVTFISLLFLFGGVSG (SEQ ID NO:28), or
   [0434] MKWVTFISLLFLFGGVLGDLHKS (SEQ ID NO:29)
[0435] p) a consensus signal sequence (MPTWAWWLFLVLLLALWAPARG, SEQ ID NO:30)
[0436] q) acid phosphatase (PH05) leader (e.g., MFKSVVYSILAASLANA SEQ ID NO:31)
[0437] r) the pre-sequence of MFoz-1
[0438] s) the pre-sequence of 0 glucanase (BGL2)
[0439] t) killer toxin leader
[0440] u) the presequence of killer toxin
[0441] v) k. lactis killer toxin prepro (29 amino acids; 16 amino acids of pre and 13 amino acids of pro) MNIFYIFLFLLSFVQGLEHTHRRGSLDKR (SEQ ID NO:32)
[0442] w) S. diastaticus glucoamylase Il secretion leader sequence
[0443] x) S. carlsbergensis β-galactosidase (MEL1) secretion leader sequence
[0444] y) Candida glucoamylase leader sequence
[0445] z) The hybrid leaders disclosed in EP-A-387 319 (herein incorporated by reference)
[0446] aa) the gp67 signal sequence (in conjunction with baculoviral expression systems) (e.g., amino acids 1-19 of GenBank Accession Number AAA72759) or
[0447] bb) the natural leader of the therapeutic protein X;
[0448] cc) S. cerevisiae invertase (SUC2) leader, as disclosed in JP 62-096086 (granted as 911036516, herein incorporate by reference); or
[0449] dd) Inulinase—MKLAYSLLLPLAGVSASVINYKR (SEQ ID NO:33).
[0450] ee) A modified TA57 propeptide leader variant #1—MKLKTVRSAVLSSLFASQVLGQPIDDTESQTTSVNLMADDTESAFATQTNSGGLD VVGLISMAKR (SEQ ID NO:34)
[0451] ff) A modified TA57 propeptide leader variant #2—MKLKTVRSAVLSSLFASQVLGQPIDDTESQTTSVNLMADDTESAFATQTNSGGLD VVGLISMAEEGEPKR (SEQ ID NO:35)
[0452] gg) A consensus signal peptide—MWWRLWWLLLLLLLLWPMVWA (SEQ ID NO:111)
[0453] jj) A modified HSA/kex2 signal sequence—MKWVSFISLLFLFSSAYSGSLDKR (SEQ ID NO:112)
[0454] kk) A consensus signal peptide #2—MRPTWAWWLFLVLLLALWAPARG (SEQ ID NO:105)

[0455] In a preferred embodiment, the modified HSA/kex2 signal sequence (SEQ ID NO:112) is fused to the amino terminus of an albumin fusion protein, including fusion proteins comprising albumin and a therapeutic protein as described herein, as well as albumin fusion proteins disclosed in WO93/15199; WO97/24445; WO03/60071; WO03/59934; and PCT/US04/01369, each of which are incorporated herein by reference in their entireties. The modified HSA/kex2 signal sequence is based on the HSA/kex2 signal sequence (SEQ ID NO:14) disclosed, e.g., in Sleep et al., Biotechnology 1990, vol. 8, pp. 42-46; and U.S. Pat. No. 5,302,697, both of which are incorporated herein by reference in their entireties. The modified HSA/kex2 leader sequence disclosed herein contains a non-conservative amino acid substitution (Arg to Gly) at residue 19 of the parent signal peptide. The modified HSA/kex2 signal peptide has been found to produce unexpectedly better expression yield and/or better cleavage efficiency of albumin fusion proteins when expressed in yeast than the unmodified HSA/kex2 signal sequence. Variants of the modified HSA/kex2 signal peptide are also encompassed by the invention. In particular the Gly residue at position 19 of SEQ ID NO:112 may be substituted with a Pro residue. Other conservative substitution variants of the modified HSA/kex2 signal sequence are also contemplated. Nucleic acids encoding the modified HSA/kex2 signal sequence of SEQ ID NO:112, as well as conservative substitution variants thereof, are also encompassed by the invention.

[0456] Vectors which use glutamine synthase (GS) or DHFR as the selectable markers can be amplified in the presence of the drugs methionine sulphoximine or methotrexate, respectively. An advantage of glutamine synthase based vectors are the availability of cell lines (e.g., the murine myeloma cell line, NSO) which are glutamine synthase negative. Glutamine synthase expression systems can also function in glutamine synthase expressing cells (e.g., Chinese Hamster Ovary (CHO) cells) by providing additional inhibitor to prevent the functioning of the endogenous gene. A glutamine synthase expression system and components thereof are detailed in PCT publications: WO87/04462; WO86/05807; WO89/01036; WO89/10404; and WO91/06657, which are hereby incorporated in their entireties by reference herein. Additionally, glutamine synthase expression vectors can be obtained from Lonza Biologics, Inc. (Portsmouth, N.H.). Expression and production of monoclonal antibodies using a GS expression system in murine myeloma cells is described in Bebbington et al., Bio/technology 10: 169 (1992) and in Biblia and Robinson Biotechnol. Prog. 11:1 (1995) which are herein incorporated by reference.

[0457] The present invention also relates to host cells containing the above-described vector constructs described herein, and additionally encompasses host cells containing nucleotide sequences of the invention that are operably associated with one or more heterologous control regions (e.g., promoter and/or enhancer) using techniques known of in the art. The host cell can be a higher eukaryotic cell, such as a mammalian cell (e.g., a human derived cell), or a lower eukaryotic cell, such as a yeast cell, or the host cell can be a prokaryotic cell, such as a bacterial cell. A host strain may be chosen which modulates the expression of the inserted gene sequences, or modifies and processes the gene product in the specific fashion desired. Expression from certain promoters can be elevated in the presence of certain inducers; thus expression of the genetically engineered polypeptide may be controlled. Furthermore, different host cells have characteristics and specific mechanisms for the translational and post-translational processing and modification (e.g., phosphorylation, cleavage) of proteins. Appropriate cell lines can be chosen to ensure the desired modifications and processing of the foreign protein expressed.

[0458] Introduction of the nucleic acids and nucleic acid constructs of the invention into the host cell can be effected by calcium phosphate transfection, DEAE-dextran mediated transfection, cationic lipid-mediated transfection, electroporation, transduction, infection, or other methods. Such methods are described in many standard laboratory manuals, such as Davis et al., Basic Methods In Molecular Biology (1986). It is specifically contemplated that the polypeptides of the present invention may in fact be expressed by a host cell lacking a recombinant vector.

[0459] In addition to encompassing host cells containing the vector constructs discussed herein, the invention also encompasses primary, secondary, and immortalized host cells of vertebrate origin, particularly mammalian origin, that have been engineered to delete or replace endogenous genetic material (e.g., the coding sequence corresponding to a Therapeutic protein may be replaced with an albumin fusion protein corresponding to the Therapeutic protein), and/or to include genetic material (e.g., heterologous polynucleotide sequences such as for example, an albumin fusion protein of the invention corresponding to the Therapeutic protein may be included). The genetic material operably associated with the endogenous polynucleotide may activate, alter, and/or amplify endogenous polynucleotides.

[0460] In addition, techniques known in the art may be used to operably associate heterologous polynucleotides (e.g., polynucleotides encoding an albumin protein, or a fragment or variant thereof) and/or heterologous control regions (e.g., promoter and/or enhancer) with endogenous polynucleotide sequences encoding a Therapeutic protein via homologous recombination (see, e.g., U.S. Pat. No. 5,641,670, issued Jun. 24, 1997; International Publication Number WO 96/29411; International Publication Number WO 94/12650; Koller et al., Proc. Natl. Acad. Sci. USA 86:8932-8935 (1989); and Zijlstra et al., Nature 342:435-438 (1989), the disclosures of each of which are incorporated by reference in their entireties).

[0461] Albumin fusion proteins of the invention can be recovered and purified from recombinant cell cultures by well-known methods including ammonium sulfate or ethanol precipitation, acid extraction, anion or cation exchange chromatography, phosphocellulose chromatography, hydrophobic interaction chromatography, affinity chromatography, hydroxylapatite chromatography, hydrophobic charge interaction chromatography and lectin chromatography. Most preferably, high performance liquid chromatography (“HPLC”) is employed for purification.

[0462] In preferred embodiments the albumin fusion proteins of the invention are purified using Anion Exchange Chromatography including, but not limited to, chromatography on Q-sepharose, DEAE sepharose, poros HQ, poros DEAE, Toyopearl Q, Toyopearl QAE, Toyopearl DEAE, Resource/Source Q and DEAE, Fractogel Q and DEAE columns.

[0463] In specific embodiments the albumin fusion proteins of the invention are purified using Cation Exchange Chromatography including, but not limited to, SP-sepharose, CM sepharose, poros HS, poros CM, Toyopearl SP, Toyopearl CM, Resource/Source S and CM, Fractogel S and CM columns and their equivalents and comparables.

[0464] In specific embodiments the albumin fusion proteins of the invention are purified using Hydrophobic Interaction Chromatography including, but not limited to, Phenyl, Butyl, Methyl, Octyl, Hexyl-sepharose, poros Phenyl, Butyl, Methyl, Octyl, Hexyl, Toyopearl Phenyl, Butyl, Methyl, Octyl, Hexyl Resource/Source Phenyl, Butyl, Methyl, Octyl, Hexyl, Fractogel Phenyl, Butyl, Methyl, Octyl, Hexyl columns and their equivalents and comparables.

[0465] In specific embodiments the albumin fusion proteins of the invention are purified using Size Exclusion Chromatography including, but not limited to, sepharose S100, S200, S300, superdex resin columns and their equivalents and comparables.

[0466] In specific embodiments the albumin fusion proteins of the invention are purified using Affinity Chromatography including, but not limited to, Mimetic Dye affinity, peptide affinity and antibody affinity columns that are selective for either the HSA or the “fusion target” molecules.

[0467] In preferred embodiments albumin fusion proteins of the invention are purified using one or more Chromatography methods listed above. In other preferred embodiments, albumin fusion proteins of the invention are purified using one or more of the following Chromatography columns, Q sepharose FF column, SP Sepharose FF column, Q Sepharose High Performance Column, Blue Sepharose FF column, Blue Column, Phenyl Sepharose FF column, DEAE Sepharose FF, or Methyl Column.

[0468] Additionally, albumin fusion proteins of the invention may be purified using the process described in PCT International Publication WO 00/44772 which is herein incorporated by reference in its entirety. One of skill in the art could easily modify the process described therein for use in the purification of albumin fusion proteins of the invention.

[0469] Albumin fusion proteins of the present invention may be recovered from: products of chemical synthetic procedures; and products produced by recombinant techniques from a prokaryotic or eukaryotic host, including, for example, bacterial, yeast, higher plant, insect, and mammalian cells. Depending upon the host employed in a recombinant production procedure, the polypeptides of the present invention may be glycosylated or may be non-glycosylated. In addition, albumin fusion proteins of the invention may also include an initial modified methionine residue, in some cases as a result of host-mediated processes. Thus, it is well known in the art that the N-terminal methionine encoded by the translation initiation codon generally is removed with high efficiency from any protein after translation in all eukaryotic cells. While the N-terminal methionine on most proteins also is efficiently removed in most prokaryotes, for some proteins, this prokaryotic removal process is inefficient, depending on the nature of the amino acid to which the N-terminal methionine is covalently linked.

[0470] In one embodiment, the yeast Pichia pastoris is used to express albumin fusion proteins of the invention in a eukaryotic system. Pichia pastoris is a methylotrophic yeast which can metabolize methanol as its sole carbon source. A main step in the methanol metabolization pathway is the oxidation of methanol to formaldehyde using O₂. This reaction is catalyzed by the enzyme alcohol oxidase. In order to metabolize methanol as its sole carbon source, Pichia pastoris must generate high levels of alcohol oxidase due, in part, to the relatively low affinity of alcohol oxidase for O₂. Consequently, in a growth medium depending on methanol as a main carbon source, the promoter region of one of the two alcohol oxidase genes (AOX1) is highly active. In the presence of methanol, alcohol oxidase produced from the AOX1 gene comprises up to approximately 30% of the total soluble protein in Pichia pastoris. See Ellis, S. B., et al., Mol. Cell. Biol. 5:1111-21 (1985); Koutz, P. J, et al., Yeast 5:167-77 (1989); Tschopp, J. F., et al., Nucl. Acids Res. 15:3859-76 (1987). Thus, a heterologous coding sequence, such as, for example, a polynucleotide of the present invention, under the transcriptional regulation of all or part of the AOX1 regulatory sequence is expressed at exceptionally high levels in Pichia yeast grown in the presence of methanol.

[0471] In one example, the plasmid vector pPIC9K is used to express DNA encoding an albumin fusion protein of the invention, as set forth herein, in a Pichia yeast system essentially as described in “Pichia Protocols: Methods in Molecular Biology,” D. R. Higgins and J. Cregg, eds. The Humana Press, Totowa, N.J., 1998. This expression vector allows expression and secretion of a polypeptide of the invention by virtue of the strong AOX1 promoter linked to the Pichia pastoris alkaline phosphatase (PHO) secretory signal peptide (i.e., leader) located upstream of a multiple cloning site.

[0472] Many other yeast vectors could be used in place of pPIC9K, such as, pYES2, pYD1, pTEF1/Zeo, pYES2/GS, pPICZ, pGAPZ, pGAPZalpha, pPIC9, pPIC3.5, pHIL-D2, pHIL-S1, pPIC3.5K, and PAO815, as one skilled in the art would readily appreciate, as long as the proposed expression construct provides appropriately located signals for transcription, translation, secretion (if desired), and the like, including an in-frame AUG as required.

[0473] In another embodiment, high-level expression of a heterologous coding sequence, such as, for example, a polynucleotide encoding an albumin fusion protein of the present invention, may be achieved by cloning the heterologous polynucleotide of the invention into an expression vector such as, for example, pGAPZ or pGAPZalpha, and growing the yeast culture in the absence of methanol.

[0474] In addition, albumin fusion proteins of the invention can be chemically synthesized using techniques known in the art (e.g., see Creighton, 1983, Proteins: Structures and Molecular Principles, W.H. Freeman & Co., N.Y., and Hunkapiller et al., Nature, 310:105-111 (1984)). For example, a polypeptide corresponding to a fragment of a polypeptide can be synthesized by use of a peptide synthesizer. Furthermore, if desired, nonclassical amino acids or chemical amino acid analogs can be introduced as a substitution or addition into the polypeptide sequence. Non-classical amino acids include, but are not limited to, to the D-isomers of the common amino acids, 2,4-diaminobutyric acid, a-amino isobutyric acid, 4-aminobutyric acid, Abu, 2-amino butyric acid, g-Abu, e-Ahx, 6-amino hexanoic acid, Aib, 2-amino isobutyric acid, 3-amino propionic acid, ornithine, norleucine, norvaline, hydroxyproline, sarcosine, citrulline, homocitrulline, cysteic acid, t-butylglycine, t-butylalanine, phenylglycine, cyclohexylalanine, b-alanine, fluoro-amino acids, designer amino acids such as b-methyl amino acids, Ca-methyl amino acids, Na-methyl amino acids, and amino acid analogs in general. Furthermore, the amino acid can be D (dextrorotary) or L (levorotary).

[0475] The invention encompasses albumin fusion proteins of the present invention which are differentially modified during or after translation, e.g., by glycosylation, acetylation, phosphorylation, amidation, derivatization by known protecting/blocking groups, proteolytic cleavage, linkage to an antibody molecule or other cellular ligand, etc. Any of numerous chemical modifications may be carried out by known techniques, including but not limited, to specific chemical cleavage by cyanogen bromide, trypsin, chymotrypsin, papain, V8 protease, NaBH₄; acetylation, formylation, oxidation, reduction; metabolic synthesis in the presence of tunicamycin; etc.

[0476] Additional post-translational modifications encompassed by the invention include, for example, e.g., N-linked or O-linked carbohydrate chains, processing of N-terminal or C-terminal ends), attachment of chemical moieties to the amino acid backbone, chemical modifications of N-linked or O-linked carbohydrate chains, and addition or deletion of an N-terminal methionine residue as a result of procaryotic host cell expression. The albumin fusion proteins may also be modified with a detectable label, such as an enzymatic, fluorescent, isotopic or affinity label to allow for detection and isolation of the protein.

[0477] Examples of suitable enzymes include horseradish peroxidase, alkaline phosphatase, beta-galactosidase, or acetylcholinesterase; examples of suitable prosthetic group complexes include streptavidin/biotin and avidin/biotin; examples of suitable fluorescent materials include umbelliferone, fluorescein, fluorescein isothiocyanate, rhodamine, dichlorotriazinylamine fluorescein, dansyl chloride or phycoerythrin; an example of a luminescent material includes luminol; examples of bioluminescent materials include luciferase, luciferin, and aequorin; and examples of suitable radioactive material include iodine (¹²¹I, ¹²³I, ¹²⁵I, ¹³¹I), carbon (¹⁴C), sulfur (³⁵S), tritium (³H), indium (¹¹¹In, ¹¹²In, ¹¹³In, ¹⁵⁵In), technetium (⁹⁹Tc, ^{99m}Tc), thallium (²⁰¹Ti), gallium (⁶⁸Ga, ⁶⁷Ga), palladium (¹⁰³Pd), molybdenum (⁹⁹Mo), xenon (¹³³Xe), fluorine (¹⁸F), ¹⁵³Sm, ¹⁷⁷Lu, ¹⁵⁹Gd, ¹⁴⁹Pm, ¹⁴⁰La, ¹⁷⁵Yb, ¹⁶⁶Ho, ⁹⁰Y, ⁴⁷Sc, ¹⁸⁶Re, ¹⁸⁸Re, ¹⁴²Pr, ¹⁰⁵Rh, and ⁹⁷Ru.

[0478] In specific embodiments, albumin fusion proteins of the present invention or fragments or variants thereof are attached to macrocyclic chelators that associate with radiometal ions, including but not limited to, ¹⁷⁷Lu, ⁹⁰Y, ¹⁶⁶Ho, and ¹⁵³Sm, to polypeptides. In a preferred embodiment, the radiometal ion associated with the macrocyclic chelators is ¹¹¹In. In another preferred embodiment, the radiometal ion associated with the macrocyclic chelator is ⁹⁰Y. In specific embodiments, the macrocyclic chelator is 1,4,7,10-tetraazacyclododecane-N,N′,N″,N′″-tetraacetic acid (DOTA). In other specific embodiments, DOTA is attached to an antibody of the invention or fragment thereof via linker molecule. Examples of linker molecules useful for conjugating DOTA to a polypeptide are commonly known in the art—see, for example, DeNardo et al., Clin Cancer Res. 4(10):2483-90 (1998); Peterson et al., Bioconjug. Chem. 10(4):553-7 (1999); and Zimmerman et al, Nucl. Med. Biol. 26(8):943-50 (1999); which are hereby incorporated by reference in their entirety.

[0479] As mentioned, the albumin fusion proteins of the invention may be modified by either natural processes, such as post-translational processing, or by chemical modification techniques which are well known in the art. It will be appreciated that the same type of modification may be present in the same or varying degrees at several sites in a given polypeptide. Polypeptides of the invention may be branched, for example, as a result of ubiquitination, and they may be cyclic, with or without branching. Cyclic, branched, and branched cyclic polypeptides may result from posttranslation natural processes or may be made by synthetic methods. Modifications include acetylation, acylation, ADP-ribosylation, amidation, covalent attachment of flavin, covalent attachment of a heme moiety, covalent attachment of a nucleotide or nucleotide derivative, covalent attachment of a lipid or lipid derivative, covalent attachment of phosphotidylinositol, cross-linking, cyclization, disulfide bond formation, demethylation, formation of covalent cross-links, formation of cysteine, formation of pyroglutamate, formylation, gamma-carboxylation, glycosylation, GPI anchor formation, hydroxylation, iodination, methylation, myristylation, oxidation, pegylation, proteolytic processing, phosphorylation, prenylation, racemization, selenoylation, sulfation, transfer-RNA mediated addition of amino acids to proteins such as arginylation, and ubiquitination. (See, for instance, PROTEINS—STRUCTURE AND MOLECULAR PROPERTIES, 2nd Ed., T. E. Creighton, W.H. Freeman and Company, New York (1993); POST-TRANSLATIONAL COVALENT MODIFICATION OF PROTEINS, B. C. Johnson, Ed., Academic Press, New York, pgs. 1-12 (1983); Seifter et al., Meth. Enzymol. 182:626-646 (1990); Rattan et al., Ann. N.Y. Acad. Sci. 663:48-62 (1992)).

[0480] Albumin fusion proteins of the invention and antibodies that bind a Therapeutic protein or fragments or variants thereof can be fused to marker sequences, such as a peptide to facilitate purification. In preferred embodiments, the marker amino acid sequence is a hexa-histidine peptide, such as the tag provided in a pQE vector (QIAGEN, Inc., 9259 Eton Avenue, Chatsworth, Calif., 91311), among others, many of which are commercially available. As described in Gentz et al., Proc. Natl. Acad. Sci. USA 86:821-824 (1989), for instance, hexa-histidine provides for convenient purification of the fusion protein. Other peptide tags useful for purification include, but are not limited to, the “HA” tag, which corresponds to an epitope derived from the influenza hemagglutinin protein (Wilson et al., Cell 37:767 (1984)) and the “flag” tag.

[0481] Further, an albumin fusion protein of the invention may be conjugated to a therapeutic moiety such as a cytotoxin, e.g., a cytostatic or cytocidal agent, a therapeutic agent or a radioactive metal ion, e.g., alpha-emitters such as, for example, 213Bi. A cytotoxin or cytotoxic agent includes any agent that is detrimental to cells. Examples include paclitaxol, cytochalasin B, gramicidin D, ethidium bromide, emetine, mitomycin, etoposide, tenoposide, vincristine, vinblastine, colchicin, doxorubicin, daunorubicin, dihydroxy anthracin dione, mitoxantrone, mithramycin, actinomycin D, 1-dehydrotestosterone, glucocorticoids, procaine, tetracaine, lidocaine, propranolol, and puromycin and analogs or homologs thereof. Therapeutic agents include, but are not limited to, antimetabolites (e.g., methotrexate, 6-mercaptopurine, 6-thioguanine, cytarabine, 5-fluorouracil decarbazine), alkylating agents (e.g., mechlorethamine, thioepa chlorambucil, melphalan, carmustine (BSNU) and lomustine (CCNU), cyclothosphamide, busulfan, dibromomannitol, streptozotocin, mitomycin C, and cis-dichlorodiamine platinum (II) (DDP) cisplatin), anthracyclines (e.g., daunorubicin (formerly daunomycin) and doxorubicin), antibiotics (e.g., dactinomycin (formerly actinomycin), bleomycin, mithramycin, and anthramycin (AMC)), and anti-mitotic agents (e.g., vincristine and vinblastine).

[0482] The conjugates of the invention can be used for modifying a given biological response, the therapeutic agent or drug moiety is not to be construed as limited to classical chemical therapeutic agents. For example, the drug moiety may be a protein or polypeptide possessing a desired biological activity. Such proteins may include, for example, a toxin such as abrin, ricin A, pseudomonas exotoxin, or diphtheria toxin; a protein such as tumor necrosis factor, alpha-interferon, β-interferon, nerve growth factor, platelet derived growth factor, tissue plasminogen activator, an apoptotic agent, e.g., TNF-alpha, TNF-beta, AIM I (See, International Publication No. WO 97/33899), AIM II (See, International Publication No. WO 97/34911), Fas Ligand (Takahashi et al., Int. Immunol., 6:1567-1574 (1994)), VEGI (See, International Publication No. WO 99/23105), a thrombotic agent or an anti-angiogenic agent, e.g., angiostatin or endostatin; or, biological response modifiers such as, for example, lymphokines, interleukin-1 (“IL-1”), interleukin-2 (“IL-2”), interleukin-6 (“IL-6”), granulocyte macrophage colony stimulating factor (“GM-CSF”), granulocyte colony stimulating factor (“G-CSF”), or other growth factors. Techniques for conjugating such therapeutic moiety to proteins (e.g., albumin fusion proteins) are well known in the art.

[0483] Albumin fusion proteins may also be attached to solid supports, which are particularly useful for immunoassays or purification of polypeptides that are bound by, that bind to, or associate with albumin fusion proteins of the invention. Such solid supports include, but are not limited to, glass, cellulose, polyacrylamide, nylon, polystyrene, polyvinyl chloride or polypropylene.

[0484] Albumin fusion proteins, with or without a therapeutic moiety conjugated to it, administered alone or in combination with cytotoxic factor(s) and/or cytokine(s) can be used as a therapeutic.

[0485] In embodiments where the albumin fusion protein of the invention comprises only the VH domain of an antibody that binds a Therapeutic protein, it may be necessary and/or desirable to coexpress the fusion protein with the VL domain of the same antibody that binds a Therapeutic protein, such that the VH-albumin fusion protein and VL protein will associate (either covalently or non-covalently) post-translationally.

[0486] In embodiments where the albumin fusion protein of the invention comprises only the VL domain of an antibody that binds a Therapeutic protein, it may be necessary and/or desirable to coexpress the fusion protein with the VH domain of the same antibody that binds a Therapeutic protein, such that the VL-albumin fusion protein and VH protein will associate (either covalently or non-covalently) post-translationally.

[0487] Some Therapeutic antibodies are bispecific antibodies, meaning the antibody that binds a Therapeutic protein is an artificial hybrid antibody having two different heavy/light chain pairs and two different binding sites. In order to create an albumin fusion protein corresponding to that Therapeutic protein, it is possible to create an albumin fusion protein which has an scFv fragment fused to both the N- and C-terminus of the albumin protein moiety. More particularly, the scFv fused to the N-terminus of albumin would correspond to one of the heavy/light (VH/VL) pairs of the original antibody that binds a Therapeutic protein and the scFv fused to the C-terminus of albumin would correspond to the other heavy/light (VH/VL) pair of the original antibody that binds a Therapeutic protein.

[0488] Also provided by the invention are chemically modified derivatives of the albumin fusion proteins of the invention which may provide additional advantages such as increased solubility, stability and circulating time of the polypeptide, or decreased immunogenicity (see U.S. Pat. No. 4,179,337). The chemical moieties for derivitization may be selected from water soluble polymers such as polyethylene glycol, ethylene glycol/propylene glycol copolymers, carboxymethylcellulose, dextran, polyvinyl alcohol and the like. The albumin fusion proteins may be modified at random positions within the molecule, or at predetermined positions within the molecule and may include one, two, three or more attached chemical moieties.

[0489] The polymer may be of any molecular weight, and may be branched or unbranched. For polyethylene glycol, the preferred molecular weight is between about 1 kDa and about 100 kDa (the term “about” indicating that in preparations of polyethylene glycol, some molecules will weigh more, some less, than the stated molecular weight) for ease in handling and manufacturing. Other sizes may be used, depending on the desired therapeutic profile (e.g., the duration of sustained release desired, the effects, if any on biological activity, the ease in handling, the degree or lack of antigenicity and other known effects of the polyethylene glycol to a Therapeutic protein or analog). For example, the polyethylene glycol may have an average molecular weight of about 200, 500, 1000, 1500, 2000, 2500, 3000, 3500, 4000, 4500, 5000, 5500, 6000, 6500, 7000, 7500, 8000, 8500, 9000, 9500, 10,000, 10,500, 11,000, 11,500, 12,000, 12,500, 13,000, 13,500, 14,000, 14,500, 15,000, 15,500, 16,000, 16,500, 17,000, 17,500, 18,000, 18,500, 19,000, 19,500, 20,000, 25,000, 30,000, 35,000, 40,000, 45,000, 50,000, 55,000, 60,000, 65,000, 70,000, 75,000, 80,000, 85,000, 90,000, 95,000, or 100,000 kDa.

[0490] As noted above, the polyethylene glycol may have a branched structure. Branched polyethylene glycols are described, for example, in U.S. Pat. No. 5,643,575; Morpurgo et al., Appl. Biochem. Biotechnol. 56:59-72 (1996); Vorobjev et al., Nucleosides Nucleotides 18:2745-2750 (1999); and Caliceti et al., Bioconjug. Chem. 10:638-646 (1999), the disclosures of each of which are incorporated herein by reference.

[0491] The polyethylene glycol molecules (or other chemical moieties) should be attached to the protein with consideration of effects on functional or antigenic domains of the protein. There are a number of attachment methods available to those skilled in the art, such as, for example, the method disclosed in EP 0 401 384 (coupling PEG to G-CSF), herein incorporated by reference; see also Malik et al., Exp. Hematol. 20:1028-1035 (1992), reporting pegylation of GM-CSF using tresyl chloride. For example, polyethylene glycol may be covalently bound through amino acid residues via reactive group, such as a free amino or carboxyl group. Reactive groups are those to which an activated polyethylene glycol molecule may be bound. The amino acid residues having a free amino group may include lysine residues and the N-terminal amino acid residues; those having a free carboxyl group may include aspartic acid residues glutamic acid residues and the C-terminal amino acid residue. Sulfhydryl groups may also be used as a reactive group for attaching the polyethylene glycol molecules. Preferred for therapeutic purposes is attachment at an amino group, such as attachment at the N-terminus or lysine group.

[0492] As suggested above, polyethylene glycol may be attached to proteins via linkage to any of a number of amino acid residues. For example, polyethylene glycol can be linked to proteins via covalent bonds to lysine, histidine, aspartic acid, glutamic acid, or cysteine residues. One or more reaction chemistries may be employed to attach polyethylene glycol to specific amino acid residues (e.g., lysine, histidine, aspartic acid, glutamic acid, or cysteine) of the protein or to more than one type of amino acid residue (e.g., lysine, histidine, aspartic acid, glutamic acid, cysteine and combinations thereof) of the protein.

[0493] One may specifically desire proteins chemically modified at the N-terminus. Using polyethylene glycol as an illustration of the present composition, one may select from a variety of polyethylene glycol molecules (by molecular weight, branching, etc.), the proportion of polyethylene glycol molecules to protein (polypeptide) molecules in the reaction mix, the type of pegylation reaction to be performed, and the method of obtaining the selected N-terminally pegylated protein. The method of obtaining the N-terminally pegylated preparation (i.e., separating this moiety from other monopegylated moieties if necessary) may be by purification of the N-terminally pegylated material from a population of pegylated protein molecules. Selective proteins chemically modified at the N-terminus modification may be accomplished by reductive alkylation which exploits differential reactivity of different types of primary amino groups (lysine versus the N-terminal) available for derivatization in a particular protein. Under the appropriate reaction conditions, substantially selective derivatization of the protein at the N-terminus with a carbonyl group containing polymer is achieved.

[0494] As indicated above, pegylation of the albumin fusion proteins of the invention may be accomplished by any number of means. For example, polyethylene glycol may be attached to the albumin fusion protein either directly or by an intervening linker. Linkerless systems for attaching polyethylene glycol to proteins are described in Delgado et al., Crit. Rev. Thera. Drug Carrier Sys. 9:249-304 (1992); Francis et al., Intern. J. of Hematol. 68:1-18 (1998); U.S. Pat. No. 4,002,531; U.S. Pat. No. 5,349,052; WO 95/06058; and WO 98/32466, the disclosures of each of which are incorporated herein by reference.

[0495] One system for attaching polyethylene glycol directly to amino acid residues of proteins without an intervening linker employs tresylated MPEG, which is produced by the modification of monmethoxy polyethylene glycol (MPEG) using tresylchloride (ClSO₂CH₂CF₃). Upon reaction of protein with tresylated MPEG, polyethylene glycol is directly attached to amine groups of the protein. Thus, the invention includes protein-polyethylene glycol conjugates produced by reacting proteins of the invention with a polyethylene glycol molecule having a 2,2,2-trifluoreothane sulphonyl group.

[0496] Polyethylene glycol can also be attached to proteins using a number of different intervening linkers. For example, U.S. Pat. No. 5,612,460, the entire disclosure of which is incorporated herein by reference, discloses urethane linkers for connecting polyethylene glycol to proteins. Protein-polyethylene glycol conjugates wherein the polyethylene glycol is attached to the protein by a linker can also be produced by reaction of proteins with compounds such as MPEG-succinimidylsuccinate, MPEG activated with 1,1′-carbonyldiimidazole, MPEG-2,4,5-trichloropenylcarbonate, MPEG-p-nitrophenolcarbonate, and various MPEG-succinate derivatives. A number of additional polyethylene glycol derivatives and reaction chemistries for attaching polyethylene glycol to proteins are described in International Publication No. WO 98/32466, the entire disclosure of which is incorporated herein by reference. Pegylated protein products produced using the reaction chemistries set out herein are included within the scope of the invention.

[0497] The number of polyethylene glycol moieties attached to each albumin fusion protein of the invention (i.e., the degree of substitution) may also vary. For example, the pegylated proteins of the invention may be linked, on average, to 1, 2, 3, 4, 5, 6, 7, 8, 9, 10, 12, 15, 17, 20, or more polyethylene glycol molecules. Similarly, the average degree of substitution within ranges such as 1-3, 2-4, 3-5, 4-6, 5-7, 6-8, 7-9, 8-10, 9-11, 10-12, 11-13, 12-14, 13-15, 14-16, 15-17, 16-18, 17-19, or 18-20 polyethylene glycol moieties per protein molecule. Methods for determining the degree of substitution are discussed, for example, in Delgado et al., Crit. Rev. Thera. Drug Carrier Sys. 9:249-304 (1992).

[0498] The polypeptides of the invention can be recovered and purified from chemical synthesis and recombinant cell cultures by standard methods which include, but are not limited to, ammonium sulfate or ethanol precipitation, acid extraction, anion or cation exchange chromatography, phosphocellulose chromatography, hydrophobic interaction chromatography, affinity chromatography, hydroxylapatite chromatography and lectin chromatography. Most preferably, high performance liquid chromatography (“HPLC”) is employed for purification. Well known techniques for refolding protein may be employed to regenerate active conformation when the polypeptide is denatured during isolation and/or purification.

[0499] The presence and quantity of albumin fusion proteins of the invention may be determined using ELISA, a well known immunoassay known in the art. In one ELISA protocol that would be useful for detecting/quantifying albumin fusion proteins of the invention, comprises the steps of coating an ELISA plate with an anti-human serum albumin antibody, blocking the plate to prevent non-specific binding, washing the ELISA plate, adding a solution containing the albumin fusion protein of the invention (at one or more different concentrations), adding a secondary anti-Therapeutic protein specific antibody coupled to a detectable label (as described herein or otherwise known in the art), and detecting the presence of the secondary antibody. In an alternate version of this protocol, the ELISA plate might be coated with the anti-Therapeutic protein specific antibody and the labeled secondary reagent might be the anti-human albumin specific antibody.

[0500] Uses of the Polynucleotides

[0501] Each of the polynucleotides identified herein can be used in numerous ways as reagents. The following description should be considered exemplary and utilizes known techniques.

[0502] The polynucleotides of the present invention are useful to produce the albumin fusion proteins of the invention. As described in more detail below, polynucleotides of the invention (encoding albumin fusion proteins) may be used in recombinant DNA methods useful in genetic engineering to make cells, cell lines, or tissues that express the albumin fusion protein encoded by the polynucleotides encoding albumin fusion proteins of the invention.

[0503] Polynucleotides of the present invention are also useful in gene therapy. One goal of gene therapy is to insert a normal gene into an organism having a defective gene, in an effort to correct the genetic defect. The polynucleotides disclosed in the present invention offer a means of targeting such genetic defects in a highly accurate manner. Another goal is to insert a new gene that was not present in the host genome, thereby producing a new trait in the host cell. Additional non-limiting examples of gene therapy methods encompassed by the present invention are more thoroughly described elsewhere herein (see, e.g., the sections labeled “Gene Therapy”, and Examples 61 and 62).

[0504] Uses of the Polypeptides

[0505] Each of the polypeptides identified herein can be used in numerous ways. The following description should be considered exemplary and utilizes known techniques.

[0506] Albumin fusion proteins of the invention are useful to provide immunological probes for differential identification of the tissue(s) (e.g., immunohistochemistry assays such as, for example, ABC immunoperoxidase (Hsu et al., J. Histochem. Cytochem. 29:577-580 (1981)) or cell type(s) (e.g., immunocytochemistry assays).

[0507] Albumin fusion proteins can be used to assay levels of polypeptides in a biological sample using classical immunohistological methods known to those of skill in the art (e.g., see Jalkanen, et al., J. Cell. Biol. 101:976-985 (1985); Jalkanen, et al., J. Cell. Biol. 105:3087-3096 (1987)). Other methods useful for detecting protein gene expression include immunoassays, such as the enzyme linked immunosorbent assay (ELISA) and the radioimmunoassay (RIA). Suitable assay labels are known in the art and include enzyme labels, such as, glucose oxidase; radioisotopes, such as iodine (¹³¹I, ¹²⁵I, ¹²³I, ¹²¹I), carbon (¹⁴C), sulfur (³⁵S), tritium (³H), indium (^{115m}In, ^{113m}In, ^{112m}In, ^{111m}In), and technetium (⁹⁹Tc, ^{99m}Tc), thallium (²⁰¹Ti), gallium (⁶⁸Ga, ⁶⁷Ga), palladium (¹⁰³Pd), molybdenum (⁹⁹Mo), xenon (¹³³Xe), fluorine (¹⁸F), ¹⁵³Sm, ¹⁷⁷Lu, ¹⁵⁹Gd, ¹⁴⁹Pm, ¹⁴⁰La, ¹⁷⁵Yb, ¹⁶⁶Ho, ⁹⁰Y, ⁴⁷Sc, ¹⁸⁶Re, ¹⁸⁸Re, ¹⁴²Pr, ¹⁰⁵Rh, ⁹⁷Ru; luminescent labels, such as luminol; and fluorescent labels, such as fluorescein and rhodamine, and biotin.

[0508] Albumin fusion proteins of the invention can also be detected in vivo by imaging. Labels or markers for in vivo imaging of protein include those detectable by X-radiography, nuclear magnetic resonance (NMR) or electron spin relaxtion (ESR). For X-radiography, suitable labels include radioisotopes such as barium or cesium, which emit detectable radiation but are not overtly harmful to the subject. Suitable markers for NMR and ESR include those with a detectable characteristic spin, such as deuterium, which may be incorporated into the albumin fusion protein by labeling of nutrients given to a cell line expressing the albumin fusion protein of the invention.

[0509] An albumin fusion protein which has been labeled with an appropriate detectable imaging moiety, such as a radioisotope (for example, ¹³¹I, ¹¹²In, ^{99m}Tc, (¹³¹I, ¹²⁵I, ¹²³I, ¹²¹I), carbon (¹⁴C), sulfur (³⁵S), tritium (³H), indium (^{115m}In, ^{113m}In, ¹¹²In, ¹¹¹In), and technetium (⁹⁹Tc, ^{99m}Tc), thallium (²⁰¹Ti), gallium (⁶⁸Ga, ⁶⁷Ga), palladium (¹⁰³Pd), molybdenum (⁹⁹Mo), xenon (¹³³ Xe), fluorine (¹⁸F, ¹³Sm, ¹⁷⁷Lu, ¹⁵⁹Gd, ¹⁴⁹Pm, ¹⁴⁰La, ¹⁷⁵Yb, ¹⁶⁶Ho, ⁹⁰Y, ⁴⁷Sc, ¹⁸⁶Re, ¹⁸⁸Re, ¹⁴²Pr, ¹⁰⁵Rh ⁹⁷Ru), a radio-opaque substance, or a material detectable by nuclear magnetic resonance, is introduced (for example, parenterally, subcutaneously or intraperitoneally) into the mammal to be examined for immune system disorder. It will be understood in the art that the size of the subject and the imaging system used will determine the quantity of imaging moiety needed to produce diagnostic images. In the case of a radioisotope moiety, for a human subject, the quantity of radioactivity injected will normally range from about 5 to 20 millicuries of ^{99m}Tc. The labeled albumin fusion protein will then preferentially accumulate at locations in the body (e.g., organs, cells, extracellular spaces or matrices) where one or more receptors, ligands or substrates (corresponding to that of the Therapeutic protein used to make the albumin fusion protein of the invention) are located. Alternatively, in the case where the albumin fusion protein comprises at least a fragment or variant of a Therapeutic antibody, the labeled albumin fusion protein will then preferentially accumulate at the locations in the body (e.g., organs, cells, extracellular spaces or matrices) where the polypeptides/epitopes corresponding to those bound by the Therapeutic antibody (used to make the albumin fusion protein of the invention) are located. In vivo tumor imaging is described in S. W. Burchiel et al., “Immunopharmacokinetics of Radiolabeled Antibodies and Their Fragments” (Chapter 13 in Tumor Imaging: The Radiochemical Detection of Cancer, S. W. Burchiel and B. A. Rhodes, eds., Masson Publishing Inc. (1982)). The protocols described therein could easily be modified by one of skill in the art for use with the albumin fusion proteins of the invention.

[0510] In one embodiment, the invention provides a method for the specific delivery of albumin fusion proteins of the invention to cells by administering albumin fusion proteins of the invention (e.g., polypeptides encoded by polynucleotides encoding albumin fusion proteins of the invention and/or antibodies) that are associated with heterologous polypeptides or nucleic acids. In one example, the invention provides a method for delivering a Therapeutic protein into the targeted cell. In another example, the invention provides a method for delivering a single stranded nucleic acid (e.g., antisense or ribozymes) or double stranded nucleic acid (e.g., DNA that can integrate into the cell's genome or replicate episomally and that can be transcribed) into the targeted cell.

[0511] In another embodiment, the invention provides a method for the specific destruction of cells (e.g., the destruction of tumor cells) by administering albumin fusion proteins of the invention in association with toxins or cytotoxic prodrugs.

[0512] By “toxin” is meant one or more compounds that bind and activate endogenous cytotoxic effector systems, radioisotopes, holotoxins, modified toxins, catalytic subunits of toxins, or any molecules or enzymes not normally present in or on the surface of a cell that under defined conditions cause the cell's death. Toxins that may be used according to the methods of the invention include, but are not limited to, radioisotopes known in the art, compounds such as, for example, antibodies (or complement fixing containing portions thereof) that bind an inherent or induced endogenous cytotoxic effector system, thymidine kinase, endonuclease, RNAse, alpha toxin, ricin, abrin, Pseudomonas exotoxin A, diphtheria toxin, saporin, momordin, gelonin, pokeweed antiviral protein, alpha-sarcin and cholera toxin. “Toxin” also includes a cytostatic or cytocidal agent, a therapeutic agent or a radioactive metal ion, e.g., alpha-emitters such as, for example, ²¹³Bi, or other radioisotopes such as, for example, ¹⁰³Pd, ¹³³Xe, ¹³¹I, ⁶⁸Ge, ⁵⁷Co, ⁶⁵Zn, ⁸⁵Sr, ³²P, ³⁵S, ⁹⁰Y, ¹⁵³Sm, ¹⁵³Gd, ¹⁶⁹Yb, ⁵¹Cr, ⁵⁴Mn, ⁷⁵Se, ¹¹³Sn, ⁹⁰Yttrium, ¹¹⁷Tin, ¹⁸⁶Rhenium, ¹⁶⁶Holmium, and ¹⁸⁸Rhenium; luminescent labels, such as luminol; and fluorescent labels, such as fluorescein and rhodamine, and biotin. In a specific embodiment, the invention provides a method for the specific destruction of cells (e.g., the destruction of tumor cells) by administering polypeptides of the invention or antibodies of the invention in association with the radioisotope ⁹⁰Y. In another specific embodiment, the invention provides a method for the specific destruction of cells (e.g., the destruction of tumor cells) by administering polypeptides of the invention or antibodies of the invention in association with the radioisotope ¹¹¹In. In a further specific embodiment, the invention provides a method for the specific destruction of cells (e.g., the destruction of tumor cells) by administering polypeptides of the invention or antibodies of the invention in association with the radioisotope ¹³¹I.

[0513] Techniques known in the art may be applied to label polypeptides of the invention. Such techniques include, but are not limited to, the use of bifunctional conjugating agents (see e.g., U.S. Pat. Nos. 5,756,065; 5,714,631; 5,696,239; 5,652,361; 5,505,931; 5,489,425; 5,435,990; 5,428,139; 5,342,604; 5,274,119; 4,994,560; and 5,808,003; the contents of each of which are hereby incorporated by reference in its entirety).

[0514] The albumin fusion proteins of the present invention are useful for diagnosis, treatment, prevention and/or prognosis of various disorders in mammals, preferably humans. Such disorders include, but are not limited to, those described herein under the section heading “Biological Activities,” below.

[0515] Thus, the invention provides a diagnostic method of a disorder, which involves (a) assaying the expression level of a certain polypeptide in cells or body fluid of an individual using an albumin fusion protein of the invention; and (b) comparing the assayed polypeptide expression level with a standard polypeptide expression level, whereby an increase or decrease in the assayed polypeptide expression level compared to the standard expression level is indicative of a disorder. With respect to cancer, the presence of a relatively high amount of transcript in biopsied tissue from an individual may indicate a predisposition for the development of the disease, or may provide a means for detecting the disease prior to the appearance of actual clinical symptoms. A more definitive diagnosis of this type may allow health professionals to employ preventative measures or aggressive treatment earlier thereby preventing the development or further progression of the cancer.

[0516] Moreover, albumin fusion proteins of the present invention can be used to treat or prevent diseases or conditions such as, for example, neural disorders, immune system disorders, muscular disorders, reproductive disorders, gastrointestinal disorders, pulmonary disorders, cardiovascular disorders, renal disorders, proliferative disorders, and/or cancerous diseases and conditions. For example, patients can be administered a polypeptide of the present invention in an effort to replace absent or decreased levels of the polypeptide (e.g., insulin), to supplement absent or decreased levels of a different polypeptide (e.g., hemoglobin S for hemoglobin B, SOD, catalase, DNA repair proteins), to inhibit the activity of a polypeptide (e.g., an oncogene or tumor suppressor), to activate the activity of a polypeptide (e.g., by binding to a receptor), to reduce the activity of a membrane bound receptor by competing with it for free ligand (e.g., soluble TNF receptors used in reducing inflammation), or to bring about a desired response (e.g., blood vessel growth inhibition, enhancement of the immune response to proliferative cells or tissues).

[0517] In particular, albumin fusion proteins comprising of at least a fragment or variant of a Therapeutic antibody can also be used to treat disease (as described supra, and elsewhere herein). For example, administration of an albumin fusion protein comprising of at least a fragment or variant of a Therapeutic antibody can bind, and/or neutralize the polypeptide to which the Therapeutic antibody used to make the albumin fusion protein specifically binds, and/or reduce overproduction of the polypeptide to which the Therapeutic antibody used to make the albumin fusion protein specifically binds. Similarly, administration of an albumin fusion protein comprising of at least a fragment or variant of a Therapeutic antibody can activate the polypeptide to which the Therapeutic antibody used to make the albumin fusion protein specifically binds, by binding to the polypeptide bound to a membrane (receptor).

[0518] At the very least, the albumin fusion proteins of the invention of the present invention can be used as molecular weight markers on SDS-PAGE gels or on molecular sieve gel filtration columns using methods well known to those of skill in the art. Albumin fusion proteins of the invention can also be used to raise antibodies, which in turn may be used to measure protein expression of the Therapeutic protein, albumin protein, and/or the albumin fusion protein of the invention from a recombinant cell, as a way of assessing transformation of the host cell, or in a biological sample. Moreover, the albumin fusion proteins of the present invention can be used to test the biological activities described herein.

[0519] Diagnostic Assays

[0520] The compounds of the present invention are useful for diagnosis, treatment, prevention and/or prognosis of various disorders in mammals, preferably humans. Such disorders include, but are not limited to, those described for each Therapeutic protein in the corresponding row of Table 1 and herein under the section headings “Immune Activity,” “Blood Related Disorders,” “Hyperproliferative Disorders,” “Renal Disorders,” “Cardiovascular Disorders,” “Respiratory Disorders,” “Anti-Angiogenesis Activity,” “Diseases at the Cellular Level,” “Wound Healing and Epithelial Cell Proliferation,” “Neural Activity and Neurological Diseases,” “Endocrine Disorders,” “Reproductive System Disorders,” “Infectious Disease,” “Regeneration,” and/or “Gastrointestinal Disorders,” infra.

[0521] For a number of disorders, substantially altered (increased or decreased) levels of gene expression can be detected in tissues, cells or bodily fluids (e.g., sera, plasma, urine, semen, synovial fluid or spinal fluid) taken from an individual having such a disorder, relative to a “standard” gene expression level, that is, the expression level in tissues or bodily fluids from an individual not having the disorder. Thus, the invention provides a diagnostic method useful during diagnosis of a disorder, which involves measuring the expression level of the gene encoding a polypeptide in tissues, cells or body fluid from an individual and comparing the measured gene expression level with a standard gene expression level, whereby an increase or decrease in the gene expression level(s) compared to the standard is indicative of a disorder. These diagnostic assays may be performed in vivo or in vitro, such as, for example, on blood samples, biopsy tissue or autopsy tissue.

[0522] The present invention is also useful as a prognostic indicator, whereby patients exhibiting enhanced or depressed gene expression will experience a worse clinical outcome.

[0523] By “assaying the expression level of the gene encoding a polypeptide” is intended qualitatively or quantitatively measuring or estimating the level of a particular polypeptide (e.g. a polypeptide corresponding to a Therapeutic protein disclosed in Table 1) or the level of the mRNA encoding the polypeptide of the invention in a first biological sample either directly (e.g., by determining or estimating absolute protein level or mRNA level) or relatively (e.g., by comparing to the polypeptide level or mRNA level in a second biological sample). Preferably, the polypeptide expression level or mRNA level in the first biological sample is measured or estimated and compared to a standard polypeptide level or mRNA level, the standard being taken from a second biological sample obtained from an individual not having the disorder or being determined by averaging levels from a population of individuals not having the disorder. As will be appreciated in the art, once a standard polypeptide level or mRNA level is known, it can be used repeatedly as a standard for comparison.

[0524] By “biological sample” is intended any biological sample obtained from an individual, cell line, tissue culture, or other source containing polypeptides of the invention (including portions thereof) or mRNA. As indicated, biological samples include body fluids (such as sera, plasma, urine, synovial fluid and spinal fluid) and tissue sources found to express the full length or fragments thereof of a polypeptide or mRNA. Methods for obtaining tissue biopsies and body fluids from mammals are well known in the art. Where the biological sample is to include mRNA, a tissue biopsy is the preferred source.

[0525] Total cellular RNA can be isolated from a biological sample using any suitable technique such as the single-step guanidinium-thiocyanate-phenol-chloroform method described in Chomczynski and Sacchi, Anal. Biochem. 162:156-159 (1987). Levels of mRNA encoding the polypeptides of the invention are then assayed using any appropriate method. These include Northern blot analysis, S1 nuclease mapping, the polymerase chain reaction (PCR), reverse transcription in combination with the polymerase chain reaction (RT-PCR), and reverse transcription in combination with the ligase chain reaction (RT-LCR).

[0526] The present invention also relates to diagnostic assays such as quantitative and diagnostic assays for detecting levels of polypeptides that bind to, are bound by, or associate with albumin fusion proteins of the invention, in a biological sample (e.g., cells and tissues), including determination of normal and abnormal levels of polypeptides. Thus, for instance, a diagnostic assay in accordance with the invention for detecting abnormal expression of polypeptides that bind to, are bound by, or associate with albumin fusion proteins compared to normal control tissue samples may be used to detect the presence of tumors. Assay techniques that can be used to determine levels of a polypeptide that bind to, are bound by, or associate with albumin fusion proteins of the present invention in a sample derived from a host are well-known to those of skill in the art. Such assay methods include radioimmunoassays, competitive-binding assays, Western Blot analysis and ELISA assays. Assaying polypeptide levels in a biological sample can occur using any art-known method.

[0527] Assaying polypeptide levels in a biological sample can occur using a variety of techniques. For example, polypeptide expression in tissues can be studied with classical immunohistological methods (Jalkanen et al., J. Cell. Biol. 101:976-985 (1985); Jalkanen, M., et al., J. Cell. Biol. 105:3087-3096 (1987)). Other methods useful for detecting polypeptide gene expression include immunoassays, such as the enzyme linked immunosorbent assay (ELISA) and the radioimmunoassay (RIA). Suitable antibody assay labels are known in the art and include enzyme labels, such as, glucose oxidase, and radioisotopes, such as iodine (¹²⁵I, ¹²¹I), carbon (¹⁴C), sulfur (³⁵S), tritium (³H), indium (¹¹²In), and technetium (^{99m}Tc), and fluorescent labels, such as fluorescein and rhodamine, and biotin.

[0528] The tissue or cell type to be analyzed will generally include those which are known, or suspected, to express the gene of interest (such as, for example, cancer). The protein isolation methods employed herein may, for example, be such as those described in Harlow and Lane (Harlow, E. and Lane, D., 1988, “Antibodies: A Laboratory Manual”, Cold Spring Harbor Laboratory Press, Cold Spring Harbor, N.Y.), which is incorporated herein by reference in its entirety. The isolated cells can be derived from cell culture or from a patient. The analysis of cells taken from culture may be a necessary step in the assessment of cells that could be used as part of a cell-based gene therapy technique or, alternatively, to test the effect of compounds on the expression of the gene.

[0529] For example, albumin fusion proteins may be used to quantitatively or qualitatively detect the presence of polypeptides that bind to, are bound by, or associate with albumin fusion proteins of the present invention. This can be accomplished, for example, by immunofluorescence techniques employing a fluorescently labeled albumin fusion protein coupled with light microscopic, flow cytometric, or fluorimetric detection.

[0530] In a preferred embodiment, albumin fusion proteins comprising at least a fragment or variant of an antibody that specifically binds at least a Therapeutic protein disclosed herein (e.g., the Therapeutic proteins disclosed in Table 1) or otherwise known in the art may be used to quantitatively or qualitatively detect the presence of gene products or conserved variants or peptide fragments thereof. This can be accomplished, for example, by immunofluorescence techniques employing a fluorescently labeled antibody coupled with light microscopic, flow cytometric, or fluorimetric detection.

[0531] The albumin fusion proteins of the present invention may, additionally, be employed histologically, as in immunofluorescence, immunoelectron microscopy or non-immunological assays, for in situ detection of polypeptides that bind to, are bound by, or associate with an albumin fusion protein of the present invention. In situ detection may be accomplished by removing a histological specimen from a patient, and applying thereto a labeled antibody or polypeptide of the present invention. The albumin fusion proteins are preferably applied by overlaying the labeled albumin fusion proteins onto a biological sample. Through the use of such a procedure, it is possible to determine not only the presence of the polypeptides that bind to, are bound by, or associate with albumin fusion proteins, but also its distribution in the examined tissue. Using the present invention, those of ordinary skill will readily perceive that any of a wide variety of histological methods (such as staining procedures) can be modified in order to achieve such in situ detection.

[0532] Immunoassays and non-immunoassays that detect polypeptides that bind to, are bound by, or associate with albumin fusion proteins will typically comprise incubating a sample, such as a biological fluid, a tissue extract, freshly harvested cells, or lysates of cells which have been incubated in cell culture, in the presence of a detectably labeled antibody capable of binding gene products or conserved variants or peptide fragments thereof, and detecting the bound antibody by any of a number of techniques well-known in the art.

[0533] The biological sample may be brought in contact with and immobilized onto a solid phase support or carrier such as nitrocellulose, or other solid support which is capable of immobilizing cells, cell particles or soluble proteins. The support may then be washed with suitable buffers followed by treatment with the detectably labeled albumin fusion protein of the invention. The solid phase support may then be washed with the buffer a second time to remove unbound antibody or polypeptide. Optionally the antibody is subsequently labeled. The amount of bound label on solid support may then be detected by conventional means.

[0534] By “solid phase support or carrier” is intended any support capable of binding a polypeptide (e.g., an albumin fusion protein, or polypeptide that binds, is bound by, or associates with an albumin fusion protein of the invention.) Well-known supports or carriers include glass, polystyrene, polypropylene, polyethylene, dextran, nylon, amylases, natural and modified celluloses, polyacrylamides, gabbros, and magnetite. The nature of the carrier can be either soluble to some extent or insoluble for the purposes of the present invention. The support material may have virtually any possible structural configuration so long as the coupled molecule is capable of binding to a polypeptide. Thus, the support configuration may be spherical, as in a bead, or cylindrical, as in the inside surface of a test tube, or the external surface of a rod. Alternatively, the surface may be flat such as a sheet, test strip, etc. Preferred supports include polystyrene beads. Those skilled in the art will know many other suitable carriers for binding antibody or antigen, or will be able to ascertain the same by use of routine experimentation.

[0535] The binding activity of a given lot of albumin fusion protein may be determined according to well known methods. Those skilled in the art will be able to determine operative and optimal assay conditions for each determination by employing routine experimentation.

[0536] In addition to assaying polypeptide levels in a biological sample obtained from an individual, polypeptide can also be detected in vivo by imaging. For example, in one embodiment of the invention, albumin fusion proteins of the invention are used to image diseased or neoplastic cells.

[0537] Labels or markers for in vivo imaging of albumin fusion proteins of the invention include those detectable by X-radiography, NMR, MRI, CAT-scans or ESR. For X-radiography, suitable labels include radioisotopes such as barium or cesium, which emit detectable radiation but are not overtly harmful to the subject. Suitable markers for NMR and ESR include those with a detectable characteristic spin, such as deuterium, which may be incorporated into the albumin fusion protein by labeling of nutrients of a cell line (or bacterial or yeast strain) engineered.

[0538] Additionally, albumin fusion proteins of the invention whose presence can be detected, can be administered. For example, albumin fusion proteins of the invention labeled with a radio-opaque or other appropriate compound can be administered and visualized in vivo, as discussed, above for labeled antibodies. Further, such polypeptides can be utilized for in vitro diagnostic procedures.

[0539] A polypeptide-specific antibody or antibody fragment which has been labeled with an appropriate detectable imaging moiety, such as a radioisotope (for example, ¹³¹I, ¹¹²In, ^{99m}Tc), a radio-opaque substance, or a material detectable by nuclear magnetic resonance, is introduced (for example, parenterally, subcutaneously or intraperitoneally) into the mammal to be examined for a disorder. It will be understood in the art that the size of the subject and the imaging system used will determine the quantity of imaging moiety needed to produce diagnostic images. In the case of a radioisotope moiety, for a human subject, the quantity of radioactivity injected will normally range from about 5 to 20 millicuries of ^{99m}Tc. The labeled albumin fusion protein will then preferentially accumulate at the locations in the body which contain a polypeptide or other substance that binds to, is bound by or associates with an albumin fusion protein of the present invention. In vivo tumor imaging is described in S. W. Burchiel et al., “Immunopharmacokinetics of Radiolabeled Antibodies and Their Fragments” (Chapter 13 in Tumor Imaging: The Radiochemical Detection of Cancer, S. W. Burchiel and B. A. Rhodes, eds., Masson Publishing Inc. (1982)).

[0540] One of the ways in which an albumin fusion protein of the present invention can be detectably labeled is by linking the same to a reporter enzyme and using the linked product in an enzyme immunoassay (EIA) (Voller, A., “The Enzyme Linked Immunosorbant Assay (ELISA)”, 1978, Diagnostic Horizons 2:1-7, Microbiological Associates Quarterly Publication, Walkersville, Md.); Voller et al., J. Clin. Pathol. 31:507-520 (1978); Butler, J. E., Meth. Enzymol. 73:482-523 (1981); Maggio, E. (ed.), 1980, Enzyme Immunoassay, CRC Press, Boca Raton, Fla. Ishikawa, E. et al., (eds.), 1981, Enzyme Immunoassay, Kgaku Shoin, Tokyo). The reporter enzyme which is bound to the antibody will react with an appropriate substrate, preferably a chromogenic substrate, in such a manner as to produce a chemical moiety which can be detected, for example, by spectrophotometric, fluorimetric or by visual means. Reporter enzymes which can be used to detectably label the antibody include, but are not limited to, malate dehydrogenase, staphylococcal nuclease, delta-5-steroid isomerase, yeast alcohol dehydrogenase, alpha-glycerophosphate, dehydrogenase, triose phosphate isomerase, horseradish peroxidase, alkaline phosphatase, asparaginase, glucose oxidase, beta-galactosidase, ribonuclease, urease, catalase, glucose-6-phosphate dehydrogenase, glucoamylase and acetylcholinesterase. Additionally, the detection can be accomplished by colorimetric methods which employ a chromogenic substrate for the reporter enzyme. Detection may also be accomplished by visual comparison of the extent of enzymatic reaction of a substrate in comparison with similarly prepared standards.

[0541] Albumin fusion proteins may also be radiolabelled and used in any of a variety of other immunoassays. For example, by radioactively labeling the albumin fusion proteins, it is possible to the use the albumin fusion proteins in a radioimmunoassay (RIA) (see, for example, Weintraub, B., Principles of Radioimmunoassays, Seventh Training Course on Radioligand Assay Techniques, The Endocrine Society, March, 1986, which is incorporated by reference herein). The radioactive isotope can be detected by means including, but not limited to, a gamma counter, a scintillation counter, or autoradiography.

[0542] Additionally, chelator molecules, are known in the art and can be used to label the Albumin fusion proteins. Chelator molecules may be attached Albumin fusion proteins of the invention to facilitate labeling said protein with metal ions including radionuclides or fluorescent labels. For example, see Subramanian, R. and Meares, C. F., “Bifunctional Chelating Agents for Radiometal-labeled monoclonal Antibodies,” in Cancer Imaging with Radiolabeled Antibodies (D. M. Goldenberg, Ed.) Kluwer Academic Publications, Boston; Saji, H., “Targeted delivery of radiolabeled imaging and therapeutic agents: bifunctional radiopharmaceuticals.” Crit. Rev. Ther. Drug Carrier Syst. 16:209-244 (1999); Srivastava S. C. and Mease R. C., “Progress in research on ligands, nuclides and techniques for labeling monoclonal antibodies.” Int. J. Rad. Appl. Instrum. B 18:589-603 (1991); and Liu, S. and Edwards, D. S., “Bifunctional chelators for therapeutic lanthanide radiopharmaceuticals.” Bioconjug. Chem. 12:7-34 (2001). Any chelator which can be covalently bound to said Albumin fusion proteins may be used according to the present invention. The chelator may further comprise a linker moiety that connects the chelating moiety to the Albumin fusion protein.

[0543] In one embodiment, the Albumin fusion protein of the invention are attached to an acyclic chelator such as diethylene triamine-N,N,N′,N″,N″-pentaacetic acid (DPTA), analogues of DPTA, and derivatives of DPTA. As non-limiting examples, the chelator may be 2-(p-isothiocyanatobenzyl)-6-methyldiethylenetriaminepentaacetic acid (1B4M-DPTA, also known as MX-DTPA), 2-methyl-6-(rho-nitrobenzyl)-1,4,7-triazaheptane-N,N,N′,N″,N″-pentaacetic acid (nitro-1B4M-DTPA or nitro-MX-DTPA); 2-(p-isothiocyanatobenzyl)-cyclohexyldiethylenetriaminepentaacetic acid (CHX-DTPA), or N-[2-amino-3-(rho-nitrophenyl)propyl]-trans-cyclohexane-1,2-diamine-N,N′,N″-pentaacetic acid (nitro-CHX-A-DTPA).

[0544] In another embodiment, the Albumin fusion protein of the invention are attached to an acyclic terpyridine chelator such as 6,6″-bis[[N,N,N″,N″-tetra(carboxymethyl)amino]methyl]-4′-(3-amino-4-methoxyphenyl)-2,2′:6′,2″-terpyridine (TMT-amine).

[0545] In specific embodiments, the macrocyclic chelator which is attached to the Albumin fusion protein of the invention is 1,4,7,10-tetraazacyclododecane-N,N′,N″,N′″-tetraacetic acid (DOTA). In other specific embodiments, the DOTA is attached to the Albumin fusion protein of the invention via a linker molecule. Examples of linker molecules useful for conjugating DOTA to a polypeptide are commonly known in the art—see, for example, DeNardo et al., Clin. Cancer Res. 4(10):2483-90, 1998; Peterson et al., Bioconjug. Chem. 10(4):553-7, 1999; and Zimmerman et al., Nucl. Med. Biol. 26(8):943-50, 1999 which are hereby incorporated by reference in their entirety. In addition, U.S. Pat. Nos. 5,652,361 and 5,756,065, which disclose chelating agents that may be conjugated to antibodies, and methods for making and using them, are hereby incorporated by reference in their entireties. Though U.S. Pat. Nos. 5,652,361 and 5,756,065 focus on conjugating chelating agents to antibodies, one skilled in the art could readily adapt the method disclosed therein in order to conjugate chelating agents to other polypeptides.

[0546] Bifunctional chelators based on macrocyclic ligands in which conjugation is via an activated arm, or functional group, attached to the carbon backbone of the ligand can be employed as described by M. Moi et al., J. Amer. Chem. Soc. 49:2639 (1989) (2-p-nitrobenzyl-1,4,7,10-tetraazacyclododecane-N,N′,N″,N′″-tetraacetic acid); S. V. Deshpande et al., J. Nucl. Med. 31:473 (1990); G. Ruser et al., Bioconj. Chem. 1:345 (1990); C. J. Broan et al., J. C. S. Chem. Comm. 23:1739 (1990); and C. J. Anderson et al., J. Nucl. Med. 36:850 (1995).

[0547] In one embodiment, a macrocyclic chelator, such as polyazamacrocyclic chelators, optionally containing one or more carboxy, amino, hydroxamate, phosphonate, or phosphate groups, are attached to the Albumin fusion protein of the invention. In another embodiment, the chelator is a chelator selected from the group consisting of DOTA, analogues of DOTA, and derivatives of DOTA.

[0548] In one embodiment, suitable chelator molecules that may be attached to the Albumin fusion protein of the invention include DOXA (1-oxa-4,7,10-triazacyclododecanetriacetic acid), NOTA (1,4,7-triazacyclononanetriacetic acid), TETA (1,4,8,11-tetraazacyclotetradecanetetraacetic acid), and THT (4′-(3-amino-4-methoxy-phenyl)-6,6″-bis(N′,N′-dicarboxymethyl-N-methylhydra zino)-2,2′:6′,2″-terpyridine), and analogs and derivatives thereof. See, e.g., Ohmono et al., J. Med. Chem. 35: 157-162 (1992); Kung et al., J. Nucl. Med. 25: 326-332 (1984); Jurisson et al., Chem. Rev. 93:1137-1156 (1993); and U.S. Pat. No. 5,367,080. Other suitable chelators include chelating agents disclosed in U.S. Pat. Nos. 4,647,447; 4,687,659; 4,885,363; EP-A-71564; WO89/00557; and EP-A-232751.

[0549] In another embodiment, suitable macrocyclic carboxylic acid chelators which can be used in the present invention include 1,4,7,10-tetraazacyclododecane-N,N′,N″,N′″-tetraacetic acid (DOTA); 1,4,8,12-tetraazacyclopentadecane-N,N′,N″,N′″-tetraacetic acid (15N4); 1,4,7-triazacyclononane-N,N′,N″-triacetic acid (9N3); 1,5,9-triazacyclododecane-N,N′,N″-triacetic acid (12N3); and 6-bromoacetamido-benzyl-1,4,8,11-tetraazacyclotetradecane-N,N′,N″,N′″-tetraacetic acid (BAT).

[0550] A preferred chelator that can be attached to the Albumin Fusion protein of the invention is □-(5-isothiocyanato-2-methoxyphenyl)-1,4,7,10-tetraazacyclododecane-1,4,7,10-tetraacetic acid, which is also known as MeO-DOTA-NCS. A salt or ester of □-(5-isothiocyanato-2-methoxyphenyl)-1,4,7,10-tetraazacyclododecane-1,4,7,10-tetraacetic acid may also be used.

[0551] Albumin fusion proteins of the invention to which chelators such as those described are covalently attached may be labeled (via the coordination site of the chelator) with radionuclides that are suitable for therapeutic, diagnostic, or both therapeutic and diagnostic purposes. Examples of appropriate metals include Ag, At, Au, Bi, Cu, Ga, Ho, In, Lu, Pb, Pd, Pm, Pr, Rb, Re, Rh, Sc, Sr, Tc, Ti, Y, and Yb. Examples of the radionuclide used for diagnostic purposes are Fe, Gd, ¹¹¹In, ⁶⁷Ga, or ⁶⁸Ga. In another embodiment, the radionuclide used for diagnostic purposes is ¹¹¹In, or ⁶⁷Ga. Examples of the radionuclide used for therapeutic purposes are ¹⁶⁶Ho, ¹⁶⁵Dy, ⁹⁰Y, ^{115m}In, ⁵²Fe, or ⁷²Ga. In one embodiment, the radionuclide used for diagnostic purposes ¹⁶⁶Ho or ⁹⁰Y. Examples of the radionuclides used for both therapeutic and diagnostic purposes include ¹⁵³Sm, ¹⁷⁷Lu, ¹⁵⁹Gd, ¹⁷⁵Yb, or ⁴⁷Sc. In one embodiment, the radionuclide is ¹⁵³Sm, ¹⁷⁷Lu, ¹⁷⁵Yb or ⁵⁹Gd.

[0552] Preferred metal radionuclides include ⁹⁰Y, ^{99m}Tc, ¹¹¹In, ⁴⁷Sc, ⁶⁷Ga, ⁵¹Cr, ^{177m}Sn, ⁶⁷Cu, ¹⁶⁷ Tm, ⁹⁷Ru, ¹⁸⁸Re, ¹⁷⁷Lu, ¹⁹⁹Au, ⁴⁷Sc, ⁶⁷Ga, ⁵¹Cr, ^{177m}Sn, ⁶⁷CU, ¹⁶⁷Tm, ⁹⁵Ru, ¹⁸⁸Re, ¹⁷⁷Lu, ¹⁹⁹Au, ²⁰³Pb and ¹⁴¹Ce.

[0553] In a particular embodiment, Albumin fusion proteins of the invention to which chelators are covalently attached may be labeled with a metal ion selected from the group consisting of ⁹⁰Y, ¹¹¹In, ¹⁷⁷Lu, ¹⁶⁶Ho, ²¹⁵Bi, and ²²⁵Ac.

[0554] Moreover, γ-emitting radionuclides, such as ^{99m}Tc, ¹¹¹In, ⁶⁷Ga, and ¹⁶⁹Yb have been approved or under investigation for diagnostic imaging, while β-emitters, such as ⁶⁷Cu, ¹¹¹Ag, ¹⁸⁶Re, and ⁹⁰Y are useful for the applications in tumor therapy. Also other useful radionuclides include γ-emitters, such as ^{99m}Tc, ¹¹¹In, ⁶⁷Ga, and ¹⁶⁹Yb, and β-emitters, such as ⁶⁷Cu, ¹¹¹Ag, ¹⁸⁶Re, ¹⁸⁸Re, and ⁹⁰Y, as well as other radionuclides of interest such as ²¹¹At, ²¹²Bi, ¹⁷⁷Lu, ⁸⁶Rb, ¹⁰⁵Rh, ¹⁵³Sm, ¹⁹⁸Au, ¹⁴⁹ Pm, ⁸⁵Sr, ¹⁴² Pr, ²¹⁴Pb, ¹⁰⁹Pd, ¹⁶⁶Ho, ²⁰⁸Tl, and ⁴⁴Sc. Albumin fusion proteins of the invention to which chelators are covalently attached may be labeled with the radionuclides described above.

[0555] In another embodiment, Albumin fusion proteins of the invention to which chelators are covalently attached may be labeled with paramagnetic metal ions including ions of transition and lanthanide metal, such as metals having atomic numbers of 21-29, 42, 43, 44, or 57-71, in particular ions of Cr, V, Mn, Fe, Co, Ni, Cu, La, Ce, Pr, Nd, Pm, Sm, Eu, Gd, Tb, Dy, Ho, Er, Tm, Yb, and Lu. The paramagnetic metals used in compositions for magnetic resonance imaging include the elements having atomic numbers of 22 to 29, 42, 44 and 58-70.

[0556] In another embodiment, Albumin fusion proteins of the invention to which chelators are covalently attached may be labeled with fluorescent metal ions including lanthanides, in particular La, Ce, Pr, Nd, Pm, Sm, Eu (e.g., ¹⁵²Eu), Gd, Tb, Dy, Ho, Er, Tm, Yb, and Lu.

[0557] In another embodiment, Albumin fusion proteins of the invention to which chelators are covalently attached may be labeled with heavy metal-containing reporters may include atoms of Mo, Bi, Si, and W.

[0558] It is also possible to label the albumin fusion proteins with a fluorescent compound. When the fluorescently labeled antibody is exposed to light of the proper wave length, its presence can then be detected due to fluorescence. Among the most commonly used fluorescent labeling compounds are fluorescein isothiocyanate, rhodamine, phycoerythrin, phycocyanin, allophycocyanin, ophthaldehyde and fluorescamine.

[0559] The albumin fusion protein can also be detectably labeled using fluorescence emitting metals such as ¹⁵²Eu, or others of the lanthanide series. These metals can be attached to the antibody using such metal chelating groups as diethylenetriaminepentacetic acid (DTPA) or ethylenediaminetetraacetic acid (EDTA).

[0560] The albumin fusion proteins can also can be detectably labeled by coupling it to a chemiluminescent compound. The presence of the chemiluminescent-tagged albumin fusion protein is then determined by detecting the presence of luminescence that arises during the course of a chemical reaction. Examples of particularly useful chemiluminescent labeling compounds are luminol, isoluminol, theromatic acridinium ester, imidazole, acridinium salt and oxalate ester.

[0561] Likewise, a bioluminescent compound may be used to label albumin fusion proteins of the present invention. Bioluminescence is a type of chemiluminescence found in biological systems in, which a catalytic protein increases the efficiency of the chemiluminescent reaction. The presence of a bioluminescent protein is determined by detecting the presence of luminescence. Important bioluminescent compounds for purposes of labeling are luciferin, luciferase and aequorin.

[0562] Transgenic Organisms

[0563] Transgenic organisms that express the albumin fusion proteins of the invention are also included in the invention. Transgenic organisms are genetically modified organisms into which recombinant, exogenous or cloned genetic material has been transferred. Such genetic material is often referred to as a transgene. The nucleic acid sequence of the transgene may include one or more transcriptional regulatory sequences and other nucleic acid sequences such as introns, that may be necessary for optimal expression and secretion of the encoded protein. The transgene may be designed to direct the expression of the encoded protein in a manner that facilitates its recovery from the organism or from a product produced by the organism, e.g. from the milk, blood, urine, eggs, hair or seeds of the organism. The transgene may consist of nucleic acid sequences derived from the genome of the same species or of a different species than the species of the target animal. The transgene may be integrated either at a locus of a genome where that particular nucleic acid sequence is not otherwise normally found or at the normal locus for the transgene.

[0564] The term “germ cell line transgenic organism” refers to a transgenic organism in which the genetic alteration or genetic information was introduced into a germ line cell, thereby conferring the ability of the transgenic organism to transfer the genetic information to offspring. If such offspring in fact possess some or all of that alteration or genetic information, then they too are transgenic organisms. The alteration or genetic information may be foreign to the species of organism to which the recipient belongs, foreign only to the particular individual recipient, or may be genetic information already possessed by the recipient. In the last case, the altered or introduced gene may be expressed differently than the native gene.

[0565] A transgenic organism may be a transgenic animal or a transgenic plant. Transgenic animals can be produced by a variety of different methods including transfection, electroporation, microinjection, gene targeting in embryonic stem cells and recombinant viral and retroviral infection (see, e.g., U.S. Pat. No. 4,736,866; U.S. Pat. No. 5,602,307; Mullins et al. (1993) Hypertension 22(4):630-633; Brenin et al. (1997) Surg. Oncol. 6(2)99-110; Tuan (ed.), Recombinant Gene Expression Protocols, Methods in Molecular Biology No. 62, Humana Press (1997)). The method of introduction of nucleic acid fragments into recombination competent mammalian cells can be by any method which favors co-transformation of multiple nucleic acid molecules. Detailed procedures for producing transgenic animals are readily available to one skilled in the art, including the disclosures in U.S. Pat. No. 5,489,743 and U.S. Pat. No. 5,602,307.

[0566] A number of recombinant or transgenic mice have been produced, including those which express an activated oncogene sequence (U.S. Pat. No. 4,736,866); express simian SV40 T-antigen (U.S. Pat. No. 5,728,915); lack the expression of interferon regulatory factor 1 (IRF-1) (U.S. Pat. No. 5,731,490); exhibit dopaminergic dysfunction (U.S. Pat. No. 5,723,719); express at least one human gene which participates in blood pressure control (U.S. Pat. No. 5,731,489); display greater similarity to the conditions existing in naturally occurring Alzheimer's disease (U.S. Pat. No. 5,720,936); have a reduced capacity to mediate cellular adhesion (U.S. Pat. No. 5,602,307); possess a bovine growth hormone gene (Clutter et al. (1996) Genetics 143(4):1753-1760); or, are capable of generating a fully human antibody response (McCarthy (1997) The Lancet 349(9049):405).

[0567] While mice and rats remain the animals of choice for most transgenic experimentation, in some instances it is preferable or even necessary to use alternative animal species. Transgenic procedures have been successfully utilized in a variety of non-murine animals, including sheep, goats, pigs, dogs, cats, monkeys, chimpanzees, hamsters, rabbits, cows and guinea pigs (see, e.g., Kim et al. (1997) Mol. Reprod. Dev. 46(4):515-526; Houdebine (1995) Reprod. Nutr. Dev. 35(6):609-617; Petters (1994) Reprod. Fertil. Dev. 6(5):643-645; Schnieke et al. (1997) Science 278(5346):2130-2133; and Amoah (1997) J. Animal Science 75(2):578-585).

[0568] To direct the secretion of the transgene-encoded protein of the invention into the milk of transgenic mammals, it may be put under the control of a promoter that is preferentially activated in mammary epithelial cells. Promoters that control the genes encoding milk proteins are preferred, for example the promoter for casein, beta lactoglobulin, whey acid protein, or lactalbumin (see, e.g., DiTullio (1992) BioTechnology 10:74-77; Clark et al. (1989) BioTechnology 7:487-492; Gorton et al. (1987) BioTechnology 5:1183-1187; and Soulier et al. (1992) FEBS Letts. 297:13). The transgenic mammals of choice would produce large volumes of milk and have long lactating periods, for example goats, cows, camels or sheep.

[0569] An albumin fusion protein of the invention can also be expressed in a transgenic plant, e.g. a plant in which the DNA transgene is inserted into the nuclear or plastidic genome. Plant transformation procedures used to introduce foreign nucleic acids into plant cells or protoplasts are known in the art. See, in general, Methods in Enzymology Vol. 153 (“Recombinant DNA Part D”) 1987, Wu and Grossman Eds., Academic Press and European Patent Application EP 693554. Methods for generation of genetically engineered plants are further described in U.S. Pat. No. 5,283,184, U.S. Pat. No. 5,482,852, and European Patent Application EP 693 554, all of which are hereby incorporated by reference.

[0570] Pharmaceutical or Therapeutic Compositions

[0571] The albumin fusion proteins of the invention or formulations thereof may be administered by any conventional method including parenteral (e.g. subcutaneous or intramuscular) injection or intravenous infusion. The treatment may consist of a single dose or a plurality of doses over a period of time.

[0572] While it is possible for an albumin fusion protein of the invention to be administered alone, it is preferable to present it as a pharmaceutical formulation, together with one or more acceptable carriers. The carrier(s) must be “acceptable” in the sense of being compatible with the albumin fusion protein and not deleterious to the recipients thereof. Typically, the carriers will be water or saline which will be sterile and pyrogen free. Albumin fusion proteins of the invention are particularly well suited to formulation in aqueous carriers such as sterile pyrogen free water, saline or other isotonic solutions because of their extended shelf-life in solution. For instance, pharmaceutical compositions of the invention may be formulated well in advance in aqueous form, for instance, weeks or months or longer time periods before being dispensed.

[0573] For example, formulations containing the albumin fusion protein may be prepared taking into account the extended shelf-life of the albumin fusion protein in aqueous formulations. As discussed above, the shelf-life of many of these Therapeutic proteins are markedly increased or prolonged after fusion to HA.

[0574] In instances where aerosol administration is appropriate, the albumin fusion proteins of the invention can be formulated as aerosols using standard procedures. The term “aerosol” includes any gas-borne suspended phase of an albumin fusion protein of the instant invention which is capable of being inhaled into the bronchioles or nasal passages. Specifically, aerosol includes a gas-borne suspension of droplets of an albumin fusion protein of the instant invention, as may be produced in a metered dose inhaler or nebulizer, or in a mist sprayer. Aerosol also includes a dry powder composition of a compound of the instant invention suspended in air or other carrier gas, which may be delivered by insufflation from an inhaler device, for example. See Ganderton & Jones, Drug Delivery to the Respiratory Tract, Ellis Horwood (19 87); Gonda (1990) Critical Reviews in Therapeutic Drug Carrier Systems 6:273-313; and Raeburn et al., (1992) Pharmacol. Toxicol. Methods 27:143-159.

[0575] The formulations of the invention are also typically non-immunogenic, in part, because of the use of the components of the albumin fusion protein being derived from the proper species. For instance, for human use, both the Therapeutic protein and albumin portions of the albumin fusion protein will typically be human. In some cases, wherein either component is non human-derived, that component may be humanized by substitution of key amino acids so that specific epitopes appear to the human immune system to be human in nature rather than foreign.

[0576] The formulations may conveniently be presented in unit dosage form and may be prepared by any of the methods well known in the art of pharmacy. Such methods include the step of bringing into association the albumin fusion protein with the carrier that constitutes one or more accessory ingredients. In general the formulations are prepared by uniformly and intimately bringing into association the active ingredient with liquid carriers or finely divided solid carriers or both, and then, if necessary, shaping the product.

[0577] Formulations suitable for parenteral administration include aqueous and non-aqueous sterile injection solutions which may contain anti-oxidants, buffers, bacteriostats and solutes which render the formulation appropriate for the intended recipient; and aqueous and non-aqueous sterile suspensions which may include suspending agents and thickening agents. The formulations may be presented in unit-dose or multi-dose containers, for example sealed ampules, vials or syringes, and may be stored in a freeze-dried (lyophilised) condition requiring only the addition of the sterile liquid carrier, for example water for injections, immediately prior to use. Extemporaneous injection solutions and suspensions may be prepared from sterile powders. Dosage formulations may contain the Therapeutic protein portion at a lower molar concentration or lower dosage compared to the non-fused standard formulation for the Therapeutic protein given the extended serum half-life exhibited by many of the albumin fusion proteins of the invention.

[0578] As an example, when an albumin fusion protein of the invention comprises one of the proteins listed in the “Therapeutic Protein:X” column of Table 1 as one or more of the Therapeutic protein regions, the dosage form can be calculated on the basis of the potency of the albumin fusion protein relative to the potency of the therapeutic protein alone, while taking into account the prolonged serum half-life and shelf-life of the albumin fusion proteins compared to that of native therapeutic protein. For example, if the therapeutic protein is typically administered at 0.3 to 30.0 IU/kg/week, or 0.9 to 12.0 IU/kg/week, given in three or seven divided doses for a year or more. In an albumin fusion protein consisting of full length HA fused to a therapeutic protein, an equivalent dose in terms of units would represent a greater weight of agent but the dosage frequency can be reduced, for example to twice a week, once a week or less.

[0579] Formulations or compositions of the invention may be packaged together with, or included in a kit with, instructions or a package insert referring to the extended shelf-life of the albumin fusion protein component. For instance, such instructions or package inserts may address recommended storage conditions, such as time, temperature and light, taking into account the extended or prolonged shelf-life of the albumin fusion proteins of the invention. Such instructions or package inserts may also address the particular advantages of the albumin fusion proteins of the inventions, such as the ease of storage for formulations that may require use in the field, outside of controlled hospital, clinic or office conditions. As described above, formulations of the invention may be in aqueous form and may be stored under less than ideal circumstances without significant loss of therapeutic activity.

[0580] Albumin fusion proteins of the invention can also be included in nutraceuticals. For instance, certain albumin fusion proteins of the invention may be administered in natural products, including milk or milk product obtained from a transgenic mammal which expresses albumin fusion protein. Such compositions can also include plant or plant products obtained from a transgenic plant which expresses the albumin fusion protein. The albumin fusion protein can also be provided in powder or tablet form, with or without other known additives, carriers, fillers and diluents. Nutraceuticals are described in Scott Hegenhart, Food Product Design, December 1993.

[0581] The invention also provides methods of treatment and/or prevention of diseases or disorders (such as, for example, any one or more of the diseases or disorders disclosed herein) by administration to a subject of an effective amount of an albumin fusion protein of the invention or a polynucleotide encoding an albumin fusion protein of the invention (“albumin fusion polynucleotide”) in a pharmaceutically acceptable carrier.

[0582] The albumin fusion protein and/or polynucleotide will be formulated and dosed in a fashion consistent with good medical practice, taking into account the clinical condition of the individual patient (especially the side effects of treatment with the albumin fusion protein and/or polynucleotide alone), the site of delivery, the method of administration, the scheduling of administration, and other factors known to practitioners. The “effective amount” for purposes herein is thus determined by such considerations.

[0583] As a general proposition, the total pharmaceutically effective amount of the albumin fusion protein administered parenterally per dose will be in the range of about 1 ug/kg/day to 10 mg/kg/day of patient body weight, although, as noted above, this will be subject to therapeutic discretion. More preferably, this dose is at least 0.01 mg/kg/day, and most preferably for humans between about 0.01 and 1 mg/kg/day for the hormone. If given continuously, the albumin fusion protein is typically administered at a dose rate of about 1 ug/kg/hour to about 50 ug/kg/hour, either by 1-4 injections per day or by continuous subcutaneous infusions, for example, using a mini-pump. An intravenous bag solution may also be employed. The length of treatment needed to observe changes and the interval following treatment for responses to occur appears to vary depending on the desired effect.

[0584] As noted above, the albumin fusion protein of the invention has a higher plasma stablity compared to the Therapeutic protein portion (or fragment or variant thereof) alone. This increase in plasma stability should be taken into account when determining the effective amount of the albumin fusion protein to be administered per dose and the dosing administration schedule. In particular, higher plasma stability may allow the albumin fusion protein to be administered at a lower dose at the same frequency of administrations, or alternatively, may allow the albumin fusion protein to be administered in fewer dosings. Preferably, the higher stability allows the albumin fusion protein of the invention to be administered less often in fewer dosings. More preferably, the albumin fusion protein can be administered once every two weeks. Still more preferably, the albumin fusion protein can be administered once every three, four, five, or more weeks depending on the pharmacokinetics of the albumin fusion protein. For example, as discussed above, the pharmacokinetics of an IFN-alpha-HSA fusion protein supports a dosing regimen of once every 2-4 weeks or more, and even dosing at intervals of 4 weeks or more than every 4 weeks.

[0585] The effective amount of the albumin fusion protein to be administered per dose can also be denoted as the total formulated albumin fusion protein concentration given per dose. In one embodiment, the total formulated albumin fusion protein concentration administered to a patient per dose is in the range of about 10 ug/dose to about 2000 ug/dose. More preferably, the total concentration is in the range of about 100 ug/dose to about 1000 ug/dose, or alternatively, about 1000 ug/dose to about 1200 ug/dose or about 900 ug/dose to about 1800 ug/dose.

[0586] In a specific embodiment, an IFN-alpha-HSA fusion protein of the invention (e.g., produced by CIDs 2249, 2343, 2366, 2381, 2382, 2410, 3165, 3422, 3423, 3424, 3476, 3960, 4290, 4291, 4292, 4295, or 4296) is dosed in a total formulated concentration of about 90 ug/dose to about 2000 ug/dose. In more preferred embodiments, an IFN-alpha-HSA fusion protein of the invention (e.g., produced by CIDs 2249, 2343, 2366, 2381, 2382, 2410, 3165, 3422, 3423, 3424, 3476, 3960, 4290, 4291, 4292, 4295, or 4296) is dosed in a total formulated concentration of about 900 ug/dose to about 2000 ug/dose, about 900 ug/dose to about 1200 ug/dose, about 900 ug/dose to about 1800 ug/dose and most preferably in a total formulated concentration of about 1200 ug/dose to about 1800 ug/dose. In additional preferred embodiments, an IFN-alpha-HSA fusion protein of the invention (e.g., produced by CIDs 2249, 2343, 2366, 2381, 2382, 2410, 3165, 3422, 3423, 3424, 3476, 3960, 4290, 4291, 4292, 4295, or 4296) is dosed in a total formulated concentration of 600 ug/dose, 720 ug/dose, 800 ug/dose, 900 ug/dose, 1000 ug/dose, 1200 ug/dose, 1500 ug/dose, 1800 ug/dose, or 2000 ug/dose. In additional embodiments, the total formulated dose of an IFN-alpha-HSA fusion protein of the invention (e.g., produced by CIDs 2249, 2343, 2366, 2381, 2382, 2410, 3165, 3422, 3423, 3424, 3476, 3960, 4290, 4291, 4292, 4295, or 4296) is administered either alone or in combination with an antiviral compound, such as ribavirin. In additionally preferred embodiments, the total formulated dose of an IFN-alpha-HSA fusion protein of the invention (e.g., produced by CIDs 2249, 2343, 2366, 2381, 2382, 2410, 3165, 3422, 3423, 3424, 3476, 3960, 4290, 4291, 4292, 4295, or 4296) is administered in combination with one, two, three, or more antiviral compounds, including, but not limited to, ribavirin and optionally another antiviral compound.

[0587] In an additional embodiment, the total formulated concentration of an IFN-alpha-HSA fusion proteins of the invention (e.g., produced by CIDs 2249, 2343, 2366, 2381, 2382, 2410, 3165, 3422, 3423, 3424, 3476, 3960, 4290, 4291, 4292, 4295, or 4296) is administered to treat a patient infected with HCV. In a specific embodiment, the IFN-alpha-HSA fusion proteins of the invention (e.g., produced by CIDs 2249, 2343, 2366, 2381, 2382, 2410, 3165, 3422, 3423, 3424, 3476, 3960, 4290, 4291, 4292, 4295, or 4296) are administered to a Treatment naïve patient with HCV either alone or in combination with an effective amount of an antiviral compound, such as ribavirin, in a total formulated concentration of about 90 ug/dose to about 2000 ug/dose. In more preferred embodiments, the IFN-alpha-HSA fusion protein of the invention (e.g., produced by CIDs 2249, 2343, 2366, 2381, 2382, 2410, 3165, 3422, 3423, 3424, 3476, 3960, 4290, 4291, 4292, 4295, or 4296) is administered to a Treatment naïve patient with HCV either alone or in combination with an effective amount of antiviral compound, such as ribavirin, in a total formulated concentration of about 900 ug/dose to about 2000 ug/dose, about 900 ug/dose to about 1200 ug/dose, about 900 ug/dose to about 1800 ug/dose and most preferably in a total formulated concentration of about 1200 ug/dose to about 1800 ug/dose. In additional preferred embodiments, an IFN-alpha-HSA fusion protein of the invention (e.g., produced by CIDs 2249, 2343, 2366, 2381, 2382, 2410, 3165, 3422, 3423, 3424, 3476, 3960, 4290, 4291, 4292, 4295, or 4296) is administered to a Treatment naïve patient with HCV either alone or in combination with an effective amount of antiviral compound, such as ribavirin, in a total formulated concentration of 600 ug/dose, 720 ug/dose, 800 ug/dose, 900 ug/dose, 1000 ug/dose, 1200 ug/dose, 1500 ug/dose, 1800 ug/dose, or 2000 ug/dose.

[0588] In an additional embodiment, the total formulated concentration of an IFN-alpha-HSA fusion proteins of the invention are administered to a Treatment naïve patient with HCV in combination with an effective amount of one or more antiviral compounds, including, for example, ribavirin, in a total formulated concentration of about 90 ug/dose to about 2000 ug/dose. In additional preferred embodiments, the IFN-alpha-HSA fusion protein of the invention (e.g., produced by CIDs 2249, 2343, 2366, 2381, 2382, 2410, 3165, 3422, 3423, 3424, 3476, 3960, 4290, 4291, 4292, 4295, or 4296) is administered to a Treatment naïve patient with HCV in combination with one, two, three, or more antiviral compounds, including, for example, ribavirin and optionally another antiviral compound, in a total formulated concentration of about 900 ug/dose to about 2000 ug/dose, about 900 ug/dose to about 1200 ug/dose, about 900 ug/dose to about 1800 ug/dose and most preferably in a total formulated concentration of about 1200 ug/dose to about 1800 ug/dose. In additional preferred embodiments, an IFN-alpha-HSA fusion protein of the invention (e.g., produced by CIDs 2249, 2343, 2366, 2381, 2382, 2410, 3165, 3422, 3423, 3424, 3476, 3960, 4290, 4291, 4292, 4295, or 4296) is administered to a Treatment naïve patient with HCV in combination with an effective amount of one, two, three, or more antiviral compounds, including, for example, ribavirin, in a total formulated concentration of 600 ug/dose, 720 ug/dose, 800 ug/dose, 900 ug/dose, 1000 ug/dose, 1200 ug/dose, 1500 ug/dose, 1800 ug/dose, or 2000 ug/dose.

[0589] In an additional embodiment, an IFN-alpha-HSA fusion protein of the invention (e.g., produced by CIDs 2249, 2343, 2366, 2381, 2382, 2410, 3165, 3422, 3423, 3424, 3476, 3960, 4290, 4291, 4292, 4295, or 4296) is administered to a Treatment experienced patient with HCV either alone or in combination with an effective amount of antiviral compound, such as ribavirin, in a total formulated concentration of about 90 ug/dose to about 2000 ug/dose. In more preferred embodiments, an IFN-alpha-HSA fusion protein of the invention (e.g., produced by CIDs 2249, 2343, 2366, 2381, 2382, 2410, 3165, 3422, 3423, 3424, 3476, 3960, 4290, 4291, 4292, 4295, or 4296) is administered to a Treatment experienced patient with HCV either alone or in combination with an effective amount of antiviral compound, such as ribavirin, in a total formulated concentration of about 900 ug/dose to about 2000 ug/dose, about 900 ug/dose to about 1200 ug/dose, about 900 ug/dose to about 1800 ug/dose and most preferably in a total formulated concentration of about 1200 ug/dose to about 1800 ug/dose. In additional preferred embodiments, an IFN-alpha-HSA fusion proteins of the invention (e.g., produced by CIDs 2249, 2343, 2366, 2381, 2382, 2410, 3165, 3422, 3423, 3424, 3476, 3960, 4290, 4291, 4292, 4295, or 4296) is administered to a Treatment experienced patient with HCV either alone or in combination with an effective amount of antiviral compound, such as ribavirin, in a total formulated concentration of 600 ug/dose, 720 ug/dose, 800 ug/dose, 900 ug/dose, 1000 ug/dose, 1200 ug/dose, 1500 ug/dose, 1800 ug/dose, or 2000 ug/dose.

[0590] In an additional embodiment, an IFN-alpha-HSA fusion protein of the invention (e.g., produced by CIDs 2249, 2343, 2366, 2381, 2382, 2410, 3165, 3422, 3423, 3424, 3476, 3960, 4290, 4291, 4292, 4295, or 4296) is administered to a Treatment experienced patient with HCV in combination with one, two, three, or more antiviral compounds, including, for example, ribavirin and optionally another antiviral compound, in a total formulated concentration of about 90 ug/dose to about 2000 ug/dose. In more preferred embodiments, an IFN-alpha-HSA fusion protein of the invention (e.g., produced by CIDs 2249, 2343, 2366, 2381, 2382, 2410, 3165, 3422, 3423, 3424, 3476, 3960, 4290, 4291, 4292, 4295, or 4296) is administered to a Treatment experienced patient with HCV in combination with one, two, three, or more antiviral compounds, including, for example, ribavirin and optionally another antiviral compound, in a total formulated concentration of about 900 ug/dose to about 2000 ug/dose, about 900 ug/dose to about 1200 ug/dose, about 900 ug/dose to about 1800 ug/dose and most preferably in a total formulated concentration of about 1200 ug/dose to about 1800 ug/dose. In additional preferred embodiments, an IFN-alpha-HSA fusion proteins of the invention (e.g., produced by CIDs 2249, 2343, 2366, 2381, 2382, 2410, 3165, 3422, 3423, 3424, 3476, 3960, 4290, 4291, 4292, 4295, or 4296) is administered to a Treatment experienced patient with HCV in combination with an effective amount of one, two, three, or more antiviral compounds, including, for example, ribavirin and optionally another antiviral compound, in a total formulated concentration of 600 ug/dose, 720 ug/dose, 800 ug/dose, 900 ug/dose, 1000 ug/dose, 1200 ug/dose, 1500 ug/dose, 1800 ug/dose, or 2000 ug/dose.

[0591] The total formulated concentration of the albumin fusion protein and the dosing interval in which the dosing interval at which the albumin fusion protein will administered will vary depending on the desired effect and the particular therapeutic protein adminstered. In one embodiment, the total formulated albumin fusion protein concentration administered to a patient per dose is in the range of about 10 ug/dose to about 2000 ug/dose once a week, once every two weeks, once every three weeks, once every four weeks or more. More preferably, the total concentration is in the range of about 100 ug/dose to about 1000 ug/dose once a week, once every two weeks, once every three weeks, once every four weeks or more, or alternatively, about 1000 ug/dose to about 1200 ug/dose or about 900 ug/dose to about 1800 ug/dose once a week, once every two weeks, once every three weeks, once every four weeks or more.

[0592] In a specific embodiment, an IFN-alpha-HSA fusion protein of the invention (e.g., produced by CIDs 2249, 2343, 2366, 2381, 2382, 2410, 3165, 3422, 3423, 3424, 3476, 3960, 4290, 4291, 4292, 4295, or 4296) is administered at a total formulated concentration of about 90 ug/dose to about 2000 ug/dose once every two, three, four, or five weeks. In more preferred embodiments, an IFN-alpha-HSA fusion protein of the invention (e.g., produced by CIDs 2249, 2343, 2366, 2381, 2382, 2410, 3165, 3422, 3423, 3424, 3476, 3960, 4290, 4291, 4292, 4295, or 4296) is dosed in a total formulated concentration of about 900 ug/dose to about 2000 ug/dose once every one, two, three, four or five weeks; about 900 ug/dose to about 1200 ug/dose once every one, two, three, four or five weeks; about 900 ug/dose to about 1800 ug/dose once every one, two, three, four or five weeks; and most preferably in a total formulated concentration of about 1200 ug/dose to 1800 ug/dose once every one, two, three, four or five weeks. In additional embodiments, an IFN-alpha-HSA fusion protein of the invention (e.g., produced by CIDs 2249, 2343, 2366, 2381, 2382, 2410, 3165, 3422, 3423, 3424, 3476, 3960, 4290, 4291, 4292, 4295, or 4296) is administered at a total formulated concentration of about 600 ug/dose once every one, two, three, four or five weeks; 800 ug/dose once every one, two, three, four or five weeks, 900 ug/dose once every one, two, three, four or five weeks; 1000 ug/dose once every one, two, three, four or five weeks; 1200 ug/dose once every one, two, three, four or five weeks; 1500 ug/dose once every one, two, three, four or five weeks; 1600 ug/dose once every one, two, three, four or five weeks; 1800 ug/dose once every one, two, three, four or five weeks; or 2000 ug/dose once every one, two, three, four or five weeks. In more preferred embodiments, the IFN-alpha-HSA fusion protein of the invention (e.g., produced by CIDs 2249, 2343, 2366, 2381, 2382, 2410, 3165, 3422, 3423, 3424, 3476, 3960, 4290, 4291, 4292, 4295, or 4296) is administered at a total formulated concentration of 900 ug/dose once every two weeks, and more preferably at a total concentration of 1200 ug/dose once every two weeks, 1200 ug/dose once every four weeks, or 1800 ug/dose once every four weeks. In additional embodiments, the total formulated dose of an IFN-alpha-HSA fusion protein of the invention (e.g., produced by CIDs 2249, 2343, 2366, 2381, 2382, 2410, 3165, 3422, 3423, 3424, 3476, 3960, 4290, 4291, 4292, 4295, or 4296) is administered either alone or in combination with an antiviral compound, such as ribavirin. In additional preferred embodiments, the total formulated dose of an IFN-alpha-HSA fusion protein of the invention (e.g., produced by CIDs 2249, 2343, 2366, 2381, 2382, 2410, 3165, 3422, 3423, 3424, 3476, 3960, 4290, 4291, 4292, 4295, or 4296) is administered in combination with one, two, three, or more antiviral compounds, including, for example, ribavirin and optionally another antiviral compound.

[0593] In specific embodiments, an IFN-alpha-HSA fusion protein of the invention (e.g., produced by CIDs 2249, 2343, 2366, 2381, 2382, 2410, 3165, 3422, 3423, 3424, 3476, 3960, 4290, 4291, 4292, 4295, or 4296) is administered to a Treatment naïve HCV patient at a total formulated concentration of about 90 ug/dose to about 2000 ug/dose once every two, three, four, or five weeks either alone or in combination with an antiviral compound, such as ribavirin. In more preferred embodiments, an IFN-alpha-HSA fusion protein of the invention (e.g., produced by CIDs 2249, 2343, 2366, 2381, 2382, 2410, 3165, 3422, 3423, 3424, 3476, 3960, 4290, 4291, 4292, 4295, or 4296) is administered to a Treatment naïve HCV patient in a total formulated concentration of about 900 ug/dose to about 2000 ug/dose once every one, two, three, four or five weeks; about 900 ug/dose to about 1200 ug/dose once every one, two, three, four or five weeks; about 900 ug/dose to about 1800 ug/dose once every one, two, three, four or five weeks; and most preferably in a total formulated concentration of about 1200 ug/dose to about 1800 ug/dose once every one, two, three, four or five weeks either alone or in combination with an antiviral compound, including, such as ribavirin. In additional embodiments, an IFN-alpha-HSA fusion protein of the invention (e.g., produced by CIDs 2249, 2343, 2366, 2381, 2382, 2410, 3165, 3422, 3423, 3424, 3476, 3960, 4290, 4291, 4292, 4295, or 4296) is administered to a Treatment naïve HCV patient at a total formulated concentration of about 600 ug/dose once every one, two, three, four or five weeks; 800 ug/dose once every one, two, three, four or five weeks, 900 ug/dose once every one, two, three, four or five weeks; 1000 ug/dose once every one, two, three, four or five weeks; 1200 ug/dose once every one, two, three, four or five weeks; 1500 ug/dose once every one, two, three, four or five weeks; 1600 ug/dose once every one, two, three, four or five weeks; 1800 ug/dose once every one, two, three, four or five weeks; or 2000 ug/dose once every one, two, three, four or five weeks either alone or in combination with an antiviral compound, such as ribavirin.

[0594] In preferred specific embodiments, an IFN-alpha-HSA fusion protein of the invention (e.g., produced by CIDs 2249, 2343, 2366, 2381, 2382, 2410, 3165, 3422, 3423, 3424, 3476, 3960, 4290, 4291, 4292, 4295, or 4296) is administered to a Treatment naïve HCV patient at a total formulated concentration of about 90 ug/dose to about 2000 ug/dose once every two, three, four, or five weeks in combination with one, two, three, or more antiviral compounds, including, for example, ribavirin and optionally another antiviral compound. In more preferred embodiments, an IFN-alpha-HSA fusion protein of the invention (e.g., produced by CIDs 2249, 2343, 2366, 2381, 2382, 2410, 3165, 3422, 3423, 3424, 3476, 3960, 4290, 4291, 4292, 4295, or 4296) is administered to a Treatment naïve HCV patient in a total formulated concentration of about 900 ug/dose to about 2000 ug/dose once every one, two, three, four or five weeks; about 900 ug/dose to about 1200 ug/dose once every one, two, three, four or five weeks; about 900 ug/dose to about 1800 ug/dose once every one, two, three, four or five weeks; and most preferably in a total formulated concentration of about 1200 ug/dose to about 1800 ug/dose once every one, two, three, four or five weeks in combination with one or more antiviral compounds, including, for example, ribavirin in combination with one, two, three, or more antiviral compounds, including, for example, ribavirin and optionally another antiviral compound. In additional embodiments, an IFN-alpha-HSA fusion protein of the invention (e.g., produced by CIDs 2249, 2343, 2366, 2381, 2382, 2410, 3165, 3422, 3423, 3424, 3476, 3960, 4290, 4291, 4292, 4295, or 4296) is administered to a Treatment naïve HCV patient at a total formulated concentration of about 600 ug/dose once every one, two, three, four or five weeks; 800 ug/dose once every one, two, three, four or five weeks, 900 ug/dose once every one, two, three, four or five weeks; 1000 ug/dose once every one, two, three, four or five weeks; 1200 ug/dose once every one, two, three, four or five weeks; 1500 ug/dose once every one, two, three, four or five weeks; 1600 ug/dose once every one, two, three, four or five weeks; 1800 ug/dose once every one, two, three, four or five weeks; or 2000 ug/dose once every one, two, three, four or five weeks in combination with one, two, three, or more antiviral compounds, including, for example, ribavirin and optionally another antiviral compound.

[0595] In more preferred embodiments, an IFN-alpha-HSA fusion protein of the invention (e.g., produced by CIDs 2249, 2343, 2366, 2381, 2382, 2410, 3165, 3422, 3423, 3424, 3476, 3960, 4290, 4291, 4292, 4295, or 4296) is administered to a Treatment naïve HCV patient at a total formulated concentration of 900 ug/dose once every two weeks, and more preferably at a total concentration of 1200 ug/dose once every two weeks, 1200 ug/dose once every four weeks, or 1800 ug/dose once every four weeks, either alone or in combination with an antiviral compound, such as ribavirin. In most preferred embodiments, an IFN-alpha-HSA fusion protein of the invention (e.g., produced by CIDs 2249, 2343, 2366, 2381, 2382, 2410, 3165, 3422, 3423, 3424, 3476, 3960, 4290, 4291, 4292, 4295, or 4296) is administered to a Treatment naïve HCV patient at a total formulated concentration of 900 ug/dose once every two weeks, and more preferably at a total concentration of 1200 ug/dose once every two weeks, 1200 ug/dose once every four weeks, or 1800 ug/dose once every four weeks, in combination with one, two, three, or more antiviral compounds, including, for example, ribavirin and optionally another antiviral compound.

[0596] In additional specific embodiments, an IFN-alpha-HSA fusion protein of the invention (e.g., produced by CIDs 2249, 2343, 2366, 2381, 2382, 2410, 3165, 3422, 3423, 3424, 3476, 3960, 4290, 4291, 4292, 4295, or 4296) is administered to a Treatment experienced HCV patient at a total formulated concentration of about 90 ug/dose to about 2000 ug/dose once every two, three, four, or five weeks either alone or in combination with an antiviral compound, such as ribavirin. In more preferred embodiments, an IFN-alpha-HSA fusion protein of the invention (e.g., produced by CIDs 2249, 2343, 2366, 2381, 2382, 2410, 3165, 3422, 3423, 3424, 3476, 3960, 4290, 4291, 4292, 4295, or 4296) is administered to a Treatment experienced HCV patient in a total formulated concentration of about 900 ug/dose to about 2000 ug/dose once every one, two, three, four or five weeks; about 900 ug/dose to about 1200 ug/dose once every one, two, three, four or five weeks; about 900 ug/dose to about 1800 ug/dose once every one, two, three, four or five weeks; and most preferably in a total formulated concentration of about 1200 ug/dose to about 1800 ug/dose once every one, three, four or five weeks, or most preferably every two weeks either alone or in combination with an antiviral compound, such as ribavirin. In additional embodiments, an IFN-alpha-HSA fusion proteins of the invention (e.g., produced by CIDs 2249, 2343, 2366, 2381, 2382, 2410, 3165, 3422, 3423, 3424, 3476, 3960, 4290, 4291, 4292, 4295, or 4296) is administered to a Treatment experienced HCV patient at a total formulated concentration of about 600 ug/dose once every one, two, three, four or five weeks; 800 ug/dose once every one, two, three, four or five weeks, 900 ug/dose once every one, two, three, four or five weeks; 1000 ug/dose once every one, two, three, four or five weeks; 1200 ug/dose once every one, two, three, four or five weeks; 1500 ug/dose once every one, two, three, four or five weeks; 1600 ug/dose once every one, two, three, four or five weeks; 1800 ug/dose once every one, two, three, four or five weeks; or 2000 ug/dose once every one, two, three, four or five weeks either alone or in combination with an antiviral compound, such as ribavirin.

[0597] In more specific embodiments, an IFN-alpha-HSA fusion protein of the invention (e.g., produced by CIDs 2249, 2343, 2366, 2381, 2382, 2410, 3165, 3422, 3423, 3424, 3476, 3960, 4290, 4291, 4292, 4295, or 4296) is administered to a Treatment experienced HCV patient at a total formulated concentration of about 90 ug/dose to about 2000 ug/dose once every two, three, four, or five weeks in combination with one, two, three, or more antiviral compounds, including, for example, ribavirin and optionally another antiviral compound. In more preferred embodiments, an IFN-alpha-HSA fusion protein of the invention (e.g., produced by CIDs 2249, 2343, 2366, 2381, 2382, 2410, 3165, 3422, 3423, 3424, 3476, 3960, 4290, 4291, 4292, 4295, or 4296) is administered to a Treatment experienced HCV patient in a total formulated concentration of about 900 ug/dose to about 2000 ug/dose once every one, two, three, four or five weeks; about 900 ug/dose to about 1200 ug/dose once every one, two, three, four or five weeks; about 900 ug/dose to about 1800 ug/dose once every one, two, three, four or five weeks; and most preferably in a total formulated concentration of about 1200 ug/dose to about 1800 ug/dose once every one, three, four or five weeks, or most preferably every two weeks in combination with one, two, three, or more antiviral compounds, including, for example, ribavirin and optionally another antiviral compound. In additional embodiments, an IFN-alpha-HSA fusion proteins of the invention (e.g., produced by CIDs 2249, 2343, 2366, 2381, 2382, 2410, 3165, 3422, 3423, 3424, 3476, 3960, 4290, 4291, 4292, 4295, or 4296) is administered to a Treatment experienced HCV patient at a total formulated concentration of about 600 ug/dose once every one, two, three, four or five weeks; 800 ug/dose once every one, two, three, four or five weeks, 900 ug/dose once every one, two, three, four or five weeks; 1000 ug/dose once every one, two, three, four or five weeks; 1200 ug/dose once every one, two, three, four or five weeks; 1500 ug/dose once every one, two, three, four or five weeks; 1600 ug/dose once every one, two, three, four or five weeks; 1800 ug/dose once every one, two, three, four or five weeks; or 2000 ug/dose once every one, two, three, four or five weeks in combination with one, two, three, or more antiviral compounds, including, for example, ribavirin and optionally another antiviral compound.

[0598] In more preferred embodiments, an IFN-alpha-HSA fusion protein of the invention (e.g., produced by CIDs 2249, 2343, 2366, 2381, 2382, 2410, 3165, 3422, 3423, 3424, 3476, 3960, 4290, 4291, 4292, 4295, or 4296) is administered to a Treatment experienced HCV patient at a total formulated concentration of 900 ug/dose once every two weeks, and more preferably at a total concentration of 1200 ug/dose once every two weeks, 1200 ug/dose once every four weeks, or 1800 ug/dose once every four weeks, either alone or in combination with an antiviral compound, such as ribavirin. In most preferred embodiments, an IFN-alpha-HSA fusion protein of the invention (e.g., produced by CIDs 2249, 2343, 2366, 2381, 2382, 2410, 3165, 3422, 3423, 3424, 3476, 3960, 4290, 4291, 4292, 4295, or 4296) is administered to a Treatment experienced HCV patient at a total formulated concentration of 900 ug/dose once every two weeks, and more preferably at a total concentration of 1200 ug/dose once every two weeks, 1200 ug/dose once every four weeks, or 1800 ug/dose once every four weeks, in combination with one, two, three, or more antiviral compounds, including, for example, ribavirin and optionally another antiviral compound.

[0599] Albumin fusion proteins and/or polynucleotides can be are administered orally, rectally, parenterally, intracistemally, intravaginally, intraperitoneally, topically (as by powders, ointments, gels, drops or transdermal patch), bucally, or as an oral or nasal spray. “Pharmaceutically acceptable carrier” refers to a non-toxic solid, semisolid or liquid filler, diluent, encapsulating material or formulation auxiliary of any. The term “parenteral” as used herein refers to modes of administration which include intravenous, intramuscular, intraperitoneal, intrasternal, subcutaneous and intraarticular injection and infusion.

[0600] Albumin fusion proteins and/or polynucleotides of the invention are also suitably administered by sustained-release systems. Examples of sustained-release albumin fusion proteins and/or polynucleotides are administered orally, rectally, parenterally, intracistemally, intravaginally, intraperitoneally, topically (as by powders, ointments, gels, drops or transdermal patch), bucally, or as an oral or nasal spray. “Pharmaceutically acceptable carrier” refers to a non-toxic solid, semisolid or liquid filler, diluent, encapsulating material or formulation auxiliary of any type. The term “parenteral” as used herein refers to modes of administration which include intravenous, intramuscular, intraperitoneal, intrasternal, subcutaneous and intraarticular injection and infusion. Additional examples of sustained-release albumin fusion proteins and/or polynucleotides include suitable polymeric materials (such as, for example, semi-permeable polymer matrices in the form of shaped articles, e.g., films, or mirocapsules), suitable hydrophobic materials (for example as an emulsion in an acceptable oil) or ion exchange resins, and sparingly soluble derivatives (such as, for example, a sparingly soluble salt).

[0601] Sustained-release matrices include polylactides (U.S. Pat. No. 3,773,919, EP 58,481), copolymers of L-glutamic acid and gamma-ethyl-L-glutamate (Sidman et al., Biopolymers 22:547-556 (1983)), poly(2-hydroxyethyl methacrylate) (Langer et al., J. Biomed. Mater. Res. 15:167-277 (1981), and Langer, Chem. Tech. 12:98-105 (1982)), ethylene vinyl acetate (Langer et al., Id.) or poly-D-(−)-3-hydroxybutyric acid (EP 133,988).

[0602] Sustained-release albumin fusion proteins and/or polynucleotides also include liposomally entrapped albumin fusion proteins and/or polynucleotides of the invention (see generally, Langer, Science 249:1527-1533 (1990); Treat et al., in Liposomes in the Therapy of Infectious Disease and Cancer, Lopez-Berestein and Fidler (eds.), Liss, New York, pp. 317-327 and 353-365 (1989)). Liposomes containing the albumin fusion protein and/or polynucleotide are prepared by methods known per se: DE 3,218,121; Epstein et al., Proc. Natl. Acad. Sci. (USA) 82:3688-3692 (1985); Hwang et al., Proc. Natl. Acad. Sci. (USA) 77:4030-4034 (1980); EP 52,322; EP 36,676; EP 88,046; EP 143,949; EP 142,641; Japanese Pat. Appl. 83-118008; U.S. Pat. Nos. 4,485,045 and 4,544,545; and EP 102,324. Ordinarily, the liposomes are of the small (about 200-800 Angstroms) unilamellar type in which the lipid content is greater than about 30 mol. percent cholesterol, the selected proportion being adjusted for the optimal Therapeutic.

[0603] In yet an additional embodiment, the albumin fusion proteins and/or polynucleotides of the invention are delivered by way of a pump (see Langer, supra; Sefton, CRC Crit. Ref. Biomed. Eng. 14:201 (1987); Buchwald et al., Surgery 88:507 (1980); Saudek et al., N. Engl. J. Med. 321:574 (1989)).

[0604] Other controlled release systems are discussed in the review by Langer (Science 249:1527-1533 (1990)).

[0605] For parenteral administration, in one embodiment, the albumin fusion protein and/or polynucleotide is formulated generally by mixing it at the desired degree of purity, in a unit dosage injectable form (solution, suspension, or emulsion), with a pharmaceutically acceptable carrier, i.e., one that is non-toxic to recipients at the dosages and concentrations employed and is compatible with other ingredients of the formulation. For example, the formulation preferably does not include oxidizing agents and other compounds that are known to be deleterious to the Therapeutic.

[0606] Generally, the formulations are prepared by contacting the albumin fusion protein and/or polynucleotide uniformly and intimately with liquid carriers or finely divided solid carriers or both. Then, if necessary, the product is shaped into the desired formulation. Preferably the carrier is a parenteral carrier, more preferably a solution that is isotonic with the blood of the recipient. Examples of such carrier vehicles include water, saline, Ringer's solution, and dextrose solution. Non-aqueous vehicles such as fixed oils and ethyl oleate are also useful herein, as well as liposomes.

[0607] The carrier suitably contains minor amounts of additives such as substances that enhance isotonicity and chemical stability. Such materials are non-toxic to recipients at the dosages and concentrations employed, and include buffers such as phosphate, citrate, succinate, acetic acid, and other organic acids or their salts; antioxidants such as ascorbic acid; low molecular weight (less than about ten residues) polypeptides, e.g., polyarginine or tripeptides; proteins, such as serum albumin, gelatin, or immunoglobulins; hydrophilic polymers such as polyvinylpyrrolidone; amino acids, such as glycine, glutamic acid, aspartic acid, or arginine; monosaccharides, disaccharides, and other carbohydrates including cellulose or its derivatives, glucose, manose, or dextrins; chelating agents such as EDTA; sugar alcohols such as mannitol or sorbitol; counterions such as sodium; and/or nonionic surfactants such as polysorbates (including, for example, Tween-20), poloxamers, or PEG.

[0608] The albumin fusion protein is typically formulated in such vehicles at a concentration of about 0.1 mg/ml to 100 mg/ml, preferably 1-10 mg/ml, at a pH of about 3 to 8. It will be understood that the use of certain of the foregoing excipients, carriers, or stabilizers will result in the formation of polypeptide salts.

[0609] Any pharmaceutical used for therapeutic administration can be sterile. Sterility is readily accomplished by filtration through sterile filtration membranes (e.g., 0.2 micron membranes). Albumin fusion proteins and/or polynucleotides generally are placed into a container having a sterile access port, for example, an intravenous solution bag or vial having a stopper pierceable by a hypodermic injection needle.

[0610] Albumin fusion proteins and/or polynucleotides ordinarily will be stored in unit or multi-dose containers, for example, sealed ampoules or vials, as an aqueous solution or as a lyophilized formulation for reconstitution. As an example of a lyophilized formulation, 10-ml vials are filled with 5 ml of sterile-filtered 1% (w/v) aqueous albumin fusion protein and/or polynucleotide solution, and the resulting mixture is lyophilized. The infusion solution is prepared by reconstituting the lyophilized albumin fusion protein and/or polynucleotide using bacteriostatic Water-for-Injection.

[0611] In a specific and preferred embodiment, the Albumin fusion protein formulations comprises 0.01 M sodium phosphate, 0.15 mM sodium chloride, 0.16 micromole sodium octanoate/milligram of fusion protein, 15 micrograms/milliliter polysorbate 80, pH 7.2. In another specific and preferred embodiment, the Albumin fusion protein formulations consists 0.01 M sodium phosphate, 0.15 mM sodium chloride, 0.16 micromole sodium octanoate/milligram of fusion protein, 15 micrograms/milliliter polysorbate 80, pH 7.2. The pH and buffer are chosen to match physiological conditions and the salt is added as a tonicifier. Sodium octanoate has been chosen due to its reported ability to increase the thermal stability of the protein in solution. Finally, polysorbate has been added as a generic surfactant, which lowers the surface tension of the solution and lowers non-specific adsorption of the albumin fusion protein to the container closure system.

[0612] The invention also provides a pharmaceutical pack or kit comprising one or more containers filled with one or more of the ingredients of the albumin fusion proteins and/or polynucleotides of the invention. Associated with such container(s) can be a notice in the form prescribed by a governmental agency regulating the manufacture, use or sale of pharmaceuticals or biological products, which notice reflects approval by the agency of manufacture, use or sale for human administration. In addition, the albumin fusion proteins and/or polynucleotides may be employed in conjunction with other therapeutic compounds.

[0613] The albumin fusion proteins and/or polynucleotides of the invention may be administered alone or in combination with adjuvants. Adjuvants that may be administered with the albumin fusion proteins and/or polynucleotides of the invention include, but are not limited to, alum, alum plus deoxycholate (ImmunoAg), MTP-PE (Biocine Corp.), QS21 (Genentech, Inc.), BCG (e.g., THERACYS®), MPL and nonviable preparations of Corynebacterium parvum. In a specific embodiment, albumin fusion proteins and/or polynucleotides of the invention are administered in combination with alum. In another specific embodiment, albumin fusion proteins and/or polynucleotides of the invention are administered in combination with QS-21. Further adjuvants that may be administered with the albumin fusion proteins and/or polynucleotides of the invention include, but are not limited to, Monophosphoryl lipid immunomodulator, AdjuVax 100a, QS-21, QS-18, CRL1005, Aluminum salts, MF-59, and Virosomal adjuvant technology. Vaccines that may be administered with the albumin fusion proteins and/or polynucleotides of the invention include, but are not limited to, vaccines directed toward protection against MMR (measles, mumps, rubella), polio, varicella, tetanus/diptheria, hepatitis A, hepatitis B, Haemophilus influenzae B, whooping cough, pneumonia, influenza, Lyme's Disease, rotavirus, cholera, yellow fever, Japanese encephalitis, poliomyelitis, rabies, typhoid fever, and pertussis. Combinations may be administered either concomitantly, e.g., as an admixture, separately but simultaneously or concurrently; or sequentially. This includes presentations in which the combined agents are administered together as a therapeutic mixture, and also procedures in which the combined agents are administered separately but simultaneously, e.g., as through separate intravenous lines into the same individual. Administration “in combination” further includes the separate administration of one of the compounds or agents given first, followed by the second.

[0614] The albumin fusion proteins and/or polynucleotides of the invention may be administered alone or in combination with other therapeutic agents. Albumin fusion protein and/or polynucleotide agents that may be administered in combination with the albumin fusion proteins and/or polynucleotides of the invention, include but not limited to, chemotherapeutic agents, antibiotics, steroidal and non-steroidal anti-inflammatories, conventional immunotherapeutic agents, and/or therapeutic treatments described below. Combinations may be administered either concomitantly, e.g., as an admixture, separately but simultaneously or concurrently; or sequentially. This includes presentations in which the combined agents are administered together as a therapeutic mixture, and also procedures in which the combined agents are administered separately but simultaneously, e.g., as through separate intravenous lines into the same individual. Administration “in combination” further includes the separate administration of one of the compounds or agents given first, followed by the second.

[0615] In one embodiment, the albumin fusion proteins and/or polynucleotides of the invention are administered in combination with an anticoagulant. Anticoagulants that may be administered with the compositions of the invention include, but are not limited to, heparin, low molecular weight heparin, warfarin sodium (e.g., COUMADIN®), dicumarol, 4-hydroxycoumarin, anisindione (e.g., MIRADON™), acenocoumarol (e.g., nicoumalone, SINTHROME™), indan-1,3-dione, phenprocoumon (e.g., MARCUMAR™), ethyl biscoumacetate (e.g., TROMEXAN™), and aspirin. In a specific embodiment, compositions of the invention are administered in combination with heparin and/or warfarin. In another specific embodiment, compositions of the invention are administered in combination with warfarin. In another specific embodiment, compositions of the invention are administered in combination with warfarin and aspirin. In another specific embodiment, compositions of the invention are administered in combination with heparin. In another specific embodiment, compositions of the invention are administered in combination with heparin and aspirin.

[0616] In another embodiment, the albumin fusion proteins and/or polynucleotides of the invention are administered in combination with thrombolytic drugs. Thrombolytic drugs that may be administered with the compositions of the invention include, but are not limited to, plasminogen, lys-plasminogen, alpha2-antiplasmin, streptokinae (e.g., KABIKINASE™), antiresplace (e.g., EMINASE™), tissue plasminogen activator (t-PA, altevase, ACTIVASE™), urokinase (e.g., ABBOKINASE™), sauruplase, (Prourokinase, single chain urokinase), and aminocaproic acid (e.g., AMICAR™). In a specific embodiment, compositions of the invention are administered in combination with tissue plasminogen activator and aspirin.

[0617] In another embodiment, the albumin fusion proteins and/or polynucleotides of the invention are administered in combination with antiplatelet drugs. Antiplatelet drugs that may be administered with the compositions of the invention include, but are not limited to, aspirin, dipyridamole (e.g., PERSANTINE™), and ticlopidine (e.g., TICLID™).

[0618] In specific embodiments, the use of anti-coagulants, thrombolytic and/or antiplatelet drugs in combination with albumin fusion proteins and/or polynucleotides of the invention is contemplated for the prevention, diagnosis, and/or treatment of thrombosis, arterial thrombosis, venous thrombosis, thromboembolism, pulmonary embolism, atherosclerosis, myocardial infarction, transient ischemic attack, unstable angina. In specific embodiments, the use of anticoagulants, thrombolytic drugs and/or antiplatelet drugs in combination with albumin fusion proteins and/or polynucleotides of the invention is contemplated for the prevention of occlusion of saphenous grafts, for reducing the risk of periprocedural thrombosis as might accompany angioplasty procedures, for reducing the risk of stroke in patients with atrial fibrillation including nonrheumatic atrial fibrillation, for reducing the risk of embolism associated with mechanical heart valves and or mitral valves disease. Other uses for the therapeutics of the invention, alone or in combination with antiplatelet, anticoagulant, and/or thrombolytic drugs, include, but are not limited to, the prevention of occlusions in extracorporeal devices (e.g., intravascular canulas, vascular access shunts in hemodialysis patients, hemodialysis machines, and cardiopulmonary bypass machines).

[0619] In certain embodiments, albumin fusion proteins and/or polynucleotides of the invention are administered in combination with antiretroviral agents, nucleoside/nucleotide reverse transcriptase inhibitors (NRTIs), non-nucleoside reverse transcriptase inhibitors (NNRTIs), and/or protease inhibitors (PIs). NRTIs that may be administered in combination with the albumin fusion proteins and/or polynucleotides of the invention, include, but are not limited to, RETROVIR™ (zidovudine/AZT), VIDEX™ (didanosine/ddI), HIVID™ (zalcitabine/ddC), ZERIT™ (stavudine/d4T), EPIVIR™ (lamivudine/3TC), and COMBIVIR™ (zidovudine/lamivudine). NNRTIs that may be administered in combination with the albumin fusion proteins and/or polynucleotides of the invention, include, but are not limited to, VIRAMUNE™ (nevirapine), RESCRIPTOR™ (delavirdine), and SUSTIVA™ (efavirenz). Protease inhibitors that may be administered in combination with the albumin fusion proteins and/or polynucleotides of the invention, include, but are not limited to, CRIXIVAN™ (indinavir), NORVIR™ (ritonavir), INVIRASE™ (saquinavir), and VIRACEPT™ (nelfinavir). In a specific embodiment, antiretroviral agents, nucleoside reverse transcriptase inhibitors, non-nucleoside reverse transcriptase inhibitors, and/or protease inhibitors may be used in any combination with albumin fusion proteins and/or polynucleotides of the invention to treat AIDS and/or to prevent or treat HIV infection.

[0620] Additional NRTIs include LODENOSINE™ (F-ddA; an acid-stable adenosine NRTI; Triangle/Abbott; COVIRACIL™ (emtricitabine/FTC; structurally related to lamivudine (3TC) but with 3- to 10-fold greater activity in vitro; Triangle/Abbott); dOTC (BCH-10652, also structurally related to lamivudine but retains activity against a substantial proportion of lamivudine-resistant isolates; Biochem Pharma); Adefovir (refused approval for anti-HIV therapy by FDA; Gilead Sciences); PREVEON® (Adefovir Dipivoxil, the active prodrug of adefovir; its active form is PMEA-pp); TENOFOVIR™ (bis-POC PMPA, a PMPA prodrug; Gilead); DAPD/DXG (active metabolite of DAPD; Triangle/Abbott); D-D4FC (related to 3TC, with activity against AZT/3TC-resistant virus); GW420867X (Glaxo Wellcome); ZIAGEN™ (abacavir/159U89; Glaxo Wellcome Inc.); CS-87 (3′azido-2′,3′-dideoxyuridine; WO 99/66936); and S-acyl-2-thioethyl (SATE)-bearing prodrug forms of β-L-FD4C and β-L-FddC (WO 98/17281).

[0621] Additional NNRTIs include COACTINON™ (Emivirine/MKC-442, potent NNRTI of the HEPT class; Triangle/Abbott); CAPRAVIRINE™ (AG-1549/S-1153, a next generation NNRTI with activity against viruses containing the K103N mutation; Agouron); PNU-142721 (has 20- to 50-fold greater activity than its predecessor delavirdine and is active against K103N mutants; Pharmacia & Upjohn); DPC-961 and DPC-963 (second-generation derivatives of efavirenz, designed to be active against viruses with the K103N mutation; DuPont); GW-420867×(has 25-fold greater activity than HBY097 and is active against K103N mutants; Glaxo Wellcome); CALANOLIDE A (naturally occurring agent from the latex tree; active against viruses containing either or both the Y181C and K103N mutations); and Propolis (WO 99/49830).

[0622] Additional protease inhibitors include LOPINAVIR™ (ABT378/r; Abbott Laboratories); BMS-232632 (an azapeptide; Bristol-Myres Squibb); TIPRANAVIR™ (PNU-140690, a non-peptic dihydropyrone; Pharmacia & Upjohn); PD-178390 (a nonpeptidic dihydropyrone; Parke-Davis); BMS 232632 (an azapeptide; Bristol-Myers Squibb); L-756,423 (an indinavir analog; Merck); DMP-450 (a cyclic urea compound; Avid & DuPont); AG-1776 (a peptidomimetic with in vitro activity against protease inhibitor-resistant viruses; Agouron); VX-175/GW-433908 (phosphate prodrug of amprenavir; Vertex & Glaxo Welcome); CGP61755 (Ciba); and AGENERASE™ (amprenavir; Glaxo Wellcome Inc.).

[0623] Additional antiretroviral agents include fusion inhibitors/gp41 binders. Fusion inhibitors/gp41 binders include T-20 (a peptide from residues 643-678 of the HIV gp41 transmembrane protein ectodomain which binds to gp41 in its resting state and prevents transformation to the fusogenic state; Trimeris) and T-1249 (a second-generation fusion inhibitor; Trimeris).

[0624] Additional antiretroviral agents include fusion inhibitors/chemokine receptor antagonists. Fusion inhibitors/chemokine receptor antagonists include CXCR4 antagonists such as AMD 3100 (a bicyclam), SDF-1 and its analogs, and ALX40-4C (a cationic peptide), T22 (an 18 amino acid peptide; Trimeris) and the T22 analogs T134 and T140; CCR5 antagonists such as RANTES (9-68), AOP-RANTES, NNY-RANTES, and TAK-779; and CCR5/CXCR4 antagonists such as NSC 651016 (a distamycin analog). Also included are CCR2B, CCR3, and CCR6 antagonists. Chemokine receptor agonists such as RANTES, SDF-1, MIP-1α, MIP-1β, etc., may also inhibit fusion.

[0625] Additional antiretroviral agents include integrase inhibitors. Integrase inhibitors include dicaffeoylquinic (DFQA) acids; L-chicoric acid (a dicaffeoyltartaric (DCTA) acid); quinalizarin (QLC) and related anthraquinones; ZINTEVIR™ (AR 177, an oligonucleotide that probably acts at cell surface rather than being a true integrase inhibitor; Arondex); and naphthols such as those disclosed in WO 98/50347.

[0626] Additional antiretroviral agents include hydroxyurea-like compounds such as BCX-34 (a purine nucleoside phosphorylase inhibitor; Biocryst); ribonucleotide reductase inhibitors such as DIDOX™ (Molecules for Health); inosine monophosphate dehydrogenase (IMPDH) inhibitors sucha as VX-497 (Vertex); and mycopholic acids such as CellCept (mycophenolate mofetil; Roche).

[0627] Additional antiretroviral agents include inhibitors of viral integrase, inhibitors of viral genome nuclear translocation such as arylene bis(methylketone) compounds; inhibitors of HIV entry such as AOP-RANTES, NNY-RANTES, RANTES-IgG fusion protein, soluble complexes of RANTES and glycosaminoglycans (GAG), and AMD-3100; nucleocapsid zinc finger inhibitors such as dithiane compounds; targets of HIV Tat and Rev; and pharmacoenhancers such as ABT-378.

[0628] Other antiretroviral therapies and adjunct therapies include cytokines and lymphokines such as MIP-1α, MIP-1β, SDF-1α, IL-2, PROLEUKIN™ (aldesleukin/L2-7001; Chiron), IL-4, IL-10, IL-12, and IL-13; interferons such as IFN-alpha2a, IFN-alpha2b, or IFN-beta; antagonists of TNFs, NFκB, GM-CSF, M-CSF, and IL-10; agents that modulate immune activation such as cyclosporin and prednisone; vaccines such as Remune™ (HIV Immunogen), APL 400-003 (Apollon), recombinant gp120 and fragments, bivalent (B/E) recombinant envelope glycoprotein, rgp120CM235, MN rgp120, SF-2 rgp120, gp120/soluble CD4 complex, Delta JR-FL protein, branched synthetic peptide derived from discontinuous gp120 C3/C4 domain, fusion-competent immunogens, and Gag, Pol, Nef, and Tat vaccines; gene-based therapies such as genetic suppressor elements (GSEs; WO 98/54366), and intrakines (genetically modified CC chemokines targeted to the ER to block surface expression of newly synthesized CCR5 (Yang et al., PNAS 94:11567-72 (1997); Chen et al., Nat. Med. 3:1110-16 (1997)); antibodies such as the anti-CXCR4 antibody 12G5, the anti-CCR5 antibodies 2D7, 5C7, PA8, PA9, PA10, PA11, PA12, and PA14, the anti-CD4 antibodies Q4120 and RPA-T4, the anti-CCR3 antibody 7B11, the anti-gp120 antibodies 17b, 48d, 447-52D, 257-D, 268-D and 50.1, anti-Tat antibodies, anti-TNF-α antibodies, and monoclonal antibody 33A; aryl hydrocarbon (AH) receptor agonists and antagonists such as TCDD, 3,3′,4,4′,5-pentachlorobiphenyl, 3,3′,4,4′-tetrachlorobiphenyl, and α-naphthoflavone (WO 98/30213); and antioxidants such as γ-L-glutamyl-L-cysteine ethyl ester (γ-GCE; WO 99/56764).

[0629] In a further embodiment, the albumin fusion proteins and/or polynucleotides of the invention are administered in combination with one or more antiviral agent. Antiviral agents that may be administered with the albumin fusion proteins and/or polynucleotides of the invention include, but are not limited to, acyclovir, ribavirin, ribavirin analog, amantadine, remantidine, maxamine, or thymalfasin. Specifically, interferon albumin fusion protein can be administered in combination with any of these agents. Moreover, interferon alpha albumin fusion protein can also be administered with any of these agents, and preferably, interferon alpha 2a or 2b albumin fusion protein can be administered with any of these agents. Furthermore, interferon beta albumin fusion protein can also be administered with any of these agents. Additionally, any of the IFN hybrids albumin fusion proteins can be administered in combination with any of these agents.

[0630] In a most preferred embodiment, an interferon albumin fusion protein of the invention is administered in combination with ribavirin or a ribavirin analog. In a preferred embodiment, the ribavirin or ribavirin analogs that may be administered in combination with an interferon albumin fusion protein include but are not limited to COPEGUS® (Hoffman-La Roche, Nutley, N.J.), REBETOL® (Schering Corp., Kenilworth, N.J.), VIRAZOLE® (Valeant, Costa Mesa, Calif.), RIBAVINT™ (Lupin, Baltimore, Md.), RIBAZD™ (Epla, Kirachi, Pakistan), tribavirin, VIRAMIDINE™ (Valeant, Costa Mesa, Calif.), and RIBASPHERE™ (Three Rivers Pharmaceuticals, Cranberry Township, Pa.). In a further preferred embodiment, interferon alpha albumin fusion protein is administered in combination with ribavirin or ribavirin analog. In a further preferred embodiment, interferon alpha 2a albumin fusion protein is administered in combination with ribavirin or ribavirin analog. In a further preferred embodiment, interferon alpha 2b albumin fusion protein is administered in combination with ribavirin or ribavirin analog. In a further preferred embodiment, interferon beta albumin fusion protein is administered in combination with ribavirin or ribavirin analog. In a further preferred embodiment, hybrid interferon albumin fusion protein is administered in combination with ribavirin or ribavirin analog.

[0631] In a further embodiment, the albumin fusion proteins and/or polynucleotides of the invention may be administered alone or in combination with one or more antiviral agents for the treatment of viral infection. In a preferred embodiment, an interferon-albumin fusion protein of the invention may be administered in combination with one or more antiviral agents. In an additional preferred embodiment, the viral infection results from infection with a hepatitis virus. In a most preferred embodiment, the hepatitis virus is hepatitis C virus (HCV). Antiviral agents that may be administered with the albumin fusion proteins and/or polynucleotides of the invention include, but are not limited to, small-molecule inhibitors of viral enzymes, small-molecule inhibitors of RNA polymerase, nucleic acid based antiviral agents, antisense oligonucleotide inhibitors, thiazolides, novel immunomodulatory agents, and interferon enhancers. Anti-viral enzyme inhibitors that may be administered in combination with the albumin fusion proteins and/or polynucleotides of the invention include, but are not limited to, VX-950 (protease inhibitor, Vertex, Cambridge, Mass.), VX-497 (merimepodib, oral IMPDH inhibitor, Vertex, Cambridge, Mass.), BILB 1941 (protease inhibitor, Boehringer Ingelheim, Germany), SCH7 (protease inhibitor, Schering Corp., Kenilworth, N.J.), MX-3253 (glucosidase inhibitor, Migenix, Vancouver, BC), IDN-6556 (caspase inhibitor, Pfizer, New York, N.Y.), UT231B (glucosidase inhibitor, United Therapeutics, Silver Spring, Md.), R1626 (viral protease inhibitor, F. Hoffman-La Roche, Switzerland), ITMN-B (ITMN-191, protease inhibitor, InterMune, Brisbane, Calif.), Celgosivir (MBI-3253, α-glucosidase inhibitor, Migenix, Inc., Vancouver, B.C.), SCH 503034 (protease inhibitor, Schering Corp., Kenilworth, N.J.), ACH 806 (GS9132, oral protease inhibitor, Achillion, New Haven, Conn./Gilead Sciences, Foster City, Calif.). Anti-viral polymerase inhibitors that may be administered in combination with the albumin fusion proteins and/or polynucleotides of the invention may be nucleoside analogs or non-nucleoside inhibitors (NNIs). In a preferred embodiment, the anti-viral polymerase inhibitors inhibit HCV RNA polymerase. In one embodiment, the anti-viral polymerase inhibitors may be nucleoside analogs including, but not limited to, NM283 (oral prodrug of 23′-C-methyl-cytidine, Idenix, Cambride, Mass.), and 2′-C-methyl nucleosides. In another embodiment, the anti-viral polymerase inhibitors may be non-nucleoside inhibitors, including, but not limited to, JTK-103, JTK-003, and JTK-109 (Japan Tabacco, Tokyo, Japan), R803 (Rigel, South San Francisco, Calif.), HCV-371, HCV-086, and HCV-796 (ViroPharm, Exton, Pa./Wyeth, Madison, N.J.), and XTL-2125 (BC2125, XTLbio, New York, N.Y.). Anti-viral nucleic acid based agents that may be administered in combination with the albumin fusion proteins and/or polynucleotides of the invention include, but are not limited to, antisense oligonucleotides, ribozymes, and siRNAs or short hairpin RNAs (shRNA). Anti-viral antisense oligonucleotide inhibitor agents that may be administered in combination with the albumin fusion proteins and/or polynucleotides of the invention include, but are not limited to, NEUGENE® AVI-4065 (AVI Biopharma, Portland, Oreg.). In another embodiment, a thiazolide may be administered in combination with the albumin fusion proteins and/or polynucleotides of the invention. In a preferred embodiment, thiazolides that may be administered in combination with the albumin fusion proteins and/or polynucleotides of the invention include, but are not limited to ALINIA® (nitazoxanide, Romark Laboratories, L.C., Tampa, Fla.). Anti-viral immunomodulatory agents that may be administered in combination with the albumin fusion proteins and/or polynucleotides of the invention include, but are not limited to, ZADXIN® (thymosin alpha 1, thymalfasin, SciClone Pharmaceuticals Int'l, Hong Kong) and toll-like receptor (TLR) agonists, including, but not limited to, ANA245 (TLR-7 agonist, Anadys Pharmaceuticals, San Diego, Calif.), ANA975 (oral prodrug of ANA245, Anadys Pharmaceuticals, San Diego, Calif.), and CPG-10101 (ACTILON™, TLR-9 agonist, Coley Pharmaceutical Group, Wellesley, Mass.). Interferon enhancers that may be administered in combination with the albumin fusion proteins and/or polynucleotides of the invention include, but are not limited to EMZ702 (Transition Therapeutics, Toronto, Ontario). Moreover, anti-viral antibodies that may be administered in combination with the albumin fusion proteins and/or polynucleotides of the invention include, but are not limited to Tarvacin (humanized monoclonal antibody that targets phosphatidylserine on the surface of tumor endothelial cells, Peregrine Pharmaceuticals, Inc., Tustin, Calif.).

[0632] In a preferred embodiment the albumin fusion protein that may be administered alone or in combination with one or more of the antiviral agents encompassed by the invention is an inteferon-albumin fusion protein. In additional embodiment, the interferon portion of the interferon-albumin fusion protein is an interferon alpha. Non-limiting examples of interferon alpha encompassed by the invention include, but are not limited to, the interferon alpha proteins disclosed in the Therapeutic protein column of Table 1. In particular embodiments, the interferon alpha portion consists or alternatively comprises interferon alpha-2a, interferon alpha-2b, interferon alpha-2c, consensus interferon, interferon alfacon-1, interferon alpha-n1, interferon alpha-n3, any commercially available form of interferon alpha, such as, for example, INTRON® A (Schering Corp., Kenilworth, N.J.), ROFERON® A (Hoffman-La Roche, Nutley, N.J.), Berofor alpha inteferon (Boehringer Ingelheim Pharmaceutical, Inc., Ridgefied, Conn.), OMNEFERON™ (Viragen, Inc., Plantation, Fla.), MULTIFERON™ (Viragen, Inc., Plantation, Fla.) WELLFERON® (GlaxoSmithKline, London, Great Britian), INFERGEN® (Amgen, Inc., Thousands Oaks, Calif.), SUMIFERON® (Sumitomo, Japan), BELEROFON® (Nautilus Biotech, France), MAXY-ALPHAT® (Maxygen, Redwood City, Calif./Hoffman-La Roche, Nutley, N.J.), or any purified interferon alpha product or a fragment thereof. In further embodiments, the interferon alpha portion of the IFN-alpha-HSA fusion protein consists or alternatively comprises interferon alpha modified or formulated for extended or controlled release. For example, the interferon alpha portion consists, or alternatively comprises commercially available extended release or controlled release interferon alpha, including, but not limited to interferon-alpha-XL (Flamel Technologies, France) and LOCTERON™ (BioLex Therapeutics/OctoPlus, Pittsboro, N.C.). In additional embodiments, the interferon alpha portion of the IFN-alpha-HSA fusion protein may be modified by the attachment of chemical moieties. For example, the inteferon alpha portion may be modified by pegylation. Accordingly, in additional embodiments, the interferon alpha portion of the IFN-alpha-HSA fusion protein consists or alternatively comprises pegylated forms of interferon alpha-2a, 2b, or consensus interferon and include, but are not limited to, a commercially available pegylated interferon alpha, such as, for example, PEG-INTRON® (Schering Corp., Kenilworth, N.J.), PEGASYS® (Hoffman-La Roche, Nutley, N.J.), PEG-OMNIFERON™ (Viragen, Inc., Plantation, Fla.) or a fragment thereof. In an additional preferred embodiment the interferon portion of the albumin fusion protein is interferon alpha 2a or 2b interferon, interferon albumin fusion protein can be administered in combination with any of these agents. Moreover, in another embodiment, the interferon portion of the interferon-albumin fusion protein is an interferon beta or an interferon hybrids. In a further embodiment, the unfused interferon portion of the inteferon-albumin fusion protein may be used alone or in combination with one or more of the antiviral agents encompassed by the invention.

[0633] In other embodiments, albumin fusion proteins and/or polynucleotides of the invention may be administered in combination with anti-opportunistic infection agents. Anti-opportunistic agents that may be administered in combination with the albumin fusion proteins and/or polynucleotides of the invention, include, but are not limited to, TRIMETHOPRIM-SULFAMETHOXAZOLE™, DAPSONE™, PENTAMIDINE™, ATOVAQUONE™, ISONIAZID™, RIFAMPIN™, PYRAZINAMIDE™, ETHAMBUTOL™, RIFABUTIN™, CLARITHROMYCIN™, AZITHROMYCIN™, GANCICLOVIR™, FOSCARNET™, CIDOFOVIR™, FLUCONAZOLE™, ITRACONAZOLE™, KETOCONAZOLE™, ACYCLOVIR™, FAMCICOLVIR™, PYRIMETHAMINE™, LEUCOVORIN™, NEUPOGEN™ (filgrastim/G-CSF), and LEUKINE™ (sargramostim/GM-CSF). In a specific embodiment, albumin fusion proteins and/or polynucleotides of the invention are used in any combination with TRIMETHOPRIM-SULFAMETHOXAZOLE™, DAPSONE™, PENTAMIDINE™, and/or ATOVAQUONE™ to prophylactically treat or prevent an opportunistic Pneumocystis carinii pneumonia infection. In another specific embodiment, albumin fusion proteins and/or polynucleotides of the invention are used in any combination with ISONIAZID™, RIFAMPIN™, PYRAZINAMIDE™, and/or ETHAMBUTOL™ to prophylactically treat or prevent an opportunistic Mycobacterium avium complex infection. In another specific embodiment, albumin fusion proteins and/or polynucleotides of the invention are used in any combination with REFABUTIN™, CLARITHROMYCIN™, and/or AZITHROMYCIN™ to prophylactically treat or prevent an opportunistic Mycobacterium tuberculosis infection. In another specific embodiment, albumin fusion proteins and/or polynucleotides of the invention are used in any combination with GANCICLOVIR™, FOSCARNET™, and/or CIDOFOVIR™ to prophylactically treat or prevent an opportunistic cytomegalovirus infection. In another specific embodiment, albumin fusion proteins and/or polynucleotides of the invention are used in any combination with FLUCONAZOLE™, ITRACONAZOLE™, and/or KETOCONAZOLE™ to prophylactically treat or prevent an opportunistic fungal infection. In another specific embodiment, albumin fusion proteins and/or polynucleotides of the invention are used in any combination with ACYCLOVIR™ and/or FAMCICOLVIR™ to prophylactically treat or prevent an opportunistic herpes simplex virus type I and/or type II infection. In another specific embodiment, albumin fusion proteins and/or polynucleotides of the invention are used in any combination with PYRIMETHAMINE™ and/or LEUCOVORIN™ to prophylactically treat or prevent an opportunistic Toxoplasma gondii infection. In another specific embodiment, albumin fusion proteins and/or polynucleotides of the invention are used in any combination with LEUCOVORIN™ and/or NEUPOGEN™ to prophylactically treat or prevent an opportunistic bacterial infection.

[0634] In a further embodiment, the albumin fusion proteins and/or polynucleotides of the invention are administered in combination with an antibiotic agent. Antibiotic agents that may be administered with the albumin fusion proteins and/or polynucleotides of the invention include, but are not limited to, amoxicillin, beta-lactamases, aminoglycosides, beta-lactam (glycopeptide), beta-lactamases, Clindamycin, chloramphenicol, cephalosporins, ciprofloxacin, erythromycin, fluoroquinolones, macrolides, metronidazole, penicillins, quinolones, rapamycin, rifampin, streptomycin, sulfonamide, tetracyclines, trimethoprim, trimethoprim-sulfamethoxazole, and vancomycin.

[0635] In other embodiments, the albumin fusion proteins and/or polynucleotides of the invention are administered in combination with immunostimulants. Immunostimulants that may be administered in combination with the albumin fusion proteins and/or polynucleotides of the invention include, but are not limited to, levamisole (e.g., ERGAMISOL™), isoprinosine (e.g. INOSIPLEX™), interferons (e.g. interferon alpha), and interleukins (e.g., 1-2).

[0636] In other embodiments, albumin fusion proteins and/or polynucleotides of the invention are administered in combination with immunosuppressive agents. Immunosuppressive agents that may be administered in combination with the albumin fusion proteins and/or polynucleotides of the invention include, but are not limited to, steroids, cyclosporine, cyclosporine analogs, cyclophosphamide methylprednisone, prednisone, azathioprine, FK-506, 15-deoxyspergualin, and other immunosuppressive agents that act by suppressing the function of responding T cells. Other immunosuppressive agents that may be administered in combination with the albumin fusion proteins and/or polynucleotides of the invention include, but are not limited to, prednisolone, methotrexate, thalidomide, methoxsalen, rapamycin, leflunomide, mizoribine (BREDININ™), brequinar, deoxyspergualin, and azaspirane (SKF 105685), ORTHOCLONE OKT® 3 (muromonab-CD3), SANDIMMUNE™, NEORAL™, SANGDYA™ (cyclosporine), PROGRAF® (FK506, tacrolimus), CELLCEPT® (mycophenolate motefil, of which the active metabolite is mycophenolic acid), IMURAN™ (azathioprine), glucocorticosteroids, adrenocortical steroids such as DELTASONE™ (prednisone) and HYDELTRASOL™ (prednisolone), FOLEX™ and MEXATE™ (methotrxate), OXSORALEN-ULTRA™ (methoxsalen) and RAPAMUNE™ (sirolimus). In a specific embodiment, immunosuppressants may be used to prevent rejection of organ or bone marrow transplantation.

[0637] In an additional embodiment, albumin fusion proteins and/or polynucleotides of the invention are administered alone or in combination with one or more intravenous immune globulin preparations. Intravenous immune globulin preparations that may be administered with the albumin fusion proteins and/or polynucleotides of the invention include, but not limited to, GAMMAR™, IVEEGAM™, SANDOGLOBULIN™, GAMMAGARD S/D™, ATGAM™ (antithymocyte glubulin), and GAMIMUNE™. In a specific embodiment, albumin fusion proteins and/or polynucleotides of the invention are administered in combination with intravenous immune globulin preparations in transplantation therapy (e.g., bone marrow transplant).

[0638] In another embodiment, the albumin fusion proteins and/or polynucleotides of the invention are administered alone or as part of a combination therapy, either in vivo to patients or in vitro to cells, for the treatment of cancer. In a specific embodiment, the albumin fusion proteins, particularly IL-2-albumin fusions, are administered repeatedly during passive immunotherapy for cancer, such as adoptive cell transfer therapy for metastatic melanoma as described in Dudley et al. (Science Express, 19 Sep. 2002., at www.scienceexpress.org, hereby incorporated by reference in its entirety).

[0639] In certain embodiments, the albumin fusion proteins and/or polynucleotides of the invention are administered alone or in combination with an anti-inflammatory agent. Anti-inflammatory agents that may be administered with the albumin fusion proteins and/or polynucleotides of the invention include, but are not limited to, corticosteroids (e.g. betamethasone, budesonide, cortisone, dexamethasone, hydrocortisone, methylprednisolone, prednisolone, prednisone, and triamcinolone), nonsteroidal anti-inflammatory drugs (e.g., diclofenac, diflunisal, etodolac, fenoprofen, floctafenine, flurbiprofen, ibuprofen, indomethacin, ketoprofen, meclofenamate, mefenamic acid, meloxicam, nabumetone, naproxen, oxaprozin, phenylbutazone, piroxicam, sulindac, tenoxicam, tiaprofenic acid, and tolmetin.), as well as antihistamines, aminoarylcarboxylic acid derivatives, arylacetic acid derivatives, arylbutyric acid derivatives, arylcarboxylic acids, arylpropionic acid derivatives, pyrazoles, pyrazolones, salicylic acid derivatives, thiazinecarboxamides, e-acetamidocaproic acid, S-adenosylmethionine, 3-amino-4-hydroxybutyric acid, amixetrine, bendazac, benzydamine, bucolome, difenpiramide, ditazol, emorfazone, guaiazulene, nabumetone, nimesulide, orgotein, oxaceprol, paranyline, perisoxal, pifoxime, proquazone, proxazole, and tenidap.

[0640] In an additional embodiment, the compositions of the invention are administered alone or in combination with an anti-angiogenic agent. Anti-angiogenic agents that may be administered with the compositions of the invention include, but are not limited to, Angiostatin (Entremed, Rockville, Md.), Troponin-1 (Boston Life Sciences, Boston, Mass.), anti-Invasive Factor, retinoic acid and derivatives thereof, paclitaxel (Taxol), Suramin, Tissue Inhibitor of Metalloproteinase-1, Tissue Inhibitor of Metalloproteinase-2, VEGI, Plasminogen Activator Inhibitor-1, Plasminogen Activator Inhibitor-2, and various forms of the lighter “d group” transition metals.

[0641] Lighter “d group” transition metals include, for example, vanadium, molybdenum, tungsten, titanium, niobium, and tantalum species. Such transition metal species may form transition metal complexes. Suitable complexes of the above-mentioned transition metal species include oxo transition metal complexes.

[0642] Representative examples of vanadium complexes include oxo vanadium complexes such as vanadate and vanadyl complexes. Suitable vanadate complexes include metavanadate and orthovanadate complexes such as, for example, ammonium metavanadate, sodium metavanadate, and sodium orthovanadate. Suitable vanadyl complexes include, for example, vanadyl acetylacetonate and vanadyl sulfate including vanadyl sulfate hydrates such as vanadyl sulfate mono- and trihydrates.

[0643] Representative examples of tungsten and molybdenum complexes also include oxo complexes. Suitable oxo tungsten complexes include tungstate and tungsten oxide complexes. Suitable tungstate complexes include ammonium tungstate, calcium tungstate, sodium tungstate dihydrate, and tungstic acid. Suitable tungsten oxides include tungsten (IV) oxide and tungsten (VI) oxide. Suitable oxo molybdenum complexes include molybdate, molybdenum oxide, and molybdenyl complexes. Suitable molybdate complexes include ammonium molybdate and its hydrates, sodium molybdate and its hydrates, and potassium molybdate and its hydrates. Suitable molybdenum oxides include molybdenum (VI) oxide, molybdenum (VI) oxide, and molybdic acid. Suitable molybdenyl complexes include, for example, molybdenyl acetylacetonate. Other suitable tungsten and molybdenum complexes include hydroxo derivatives derived from, for example, glycerol, tartaric acid, and sugars.

[0644] A wide variety of other anti-angiogenic factors may also be utilized within the context of the present invention. Representative examples include, but are not limited to, platelet factor 4; protamine sulphate; sulphated chitin derivatives (prepared from queen crab shells), (Murata et al., Cancer Res. 51:22-26, (1991)); Sulphated Polysaccharide Peptidoglycan Complex (SP-PG) (the function of this compound may be enhanced by the presence of steroids such as estrogen, and tamoxifen citrate); Staurosporine; modulators of matrix metabolism, including for example, proline analogs, cishydroxyproline, d,L-3,4-dehydroproline, Thiaproline, alpha,alpha-dipyridyl, aminopropionitrile fumarate; 4-propyl-5-(4-pyridinyl)-2(3H)-oxazolone; Methotrexate; Mitoxantrone; Heparin; Interferons; 2 Macroglobulin-serum; ChIMP-3 (Pavloff et al., J. Bio. Chem. 267:17321-17326, (1992)); Chymostatin (Tomkinson et al., Biochem J. 286:475-480, (1992)); Cyclodextrin Tetradecasulfate; Eponemycin; Camptothecin; Fumagillin (Ingber et al., Nature 348:555-557, (1990)); Gold Sodium Thiomalate (“GST”; Matsubara and Ziff, J. Clin. Invest. 79:1440-1446, (1987)); anticollagenase-serum; alpha2-antiplasmin (Holmes et al., J. Biol. Chem. 262(4):1659-1664, (1987)); Bisantrene (National Cancer Institute); Lobenzarit disodium (N-(2)-carboxyphenyl-4-chloroanthronilic acid disodium or “CCA”; (Takeuchi et al., Agents Actions 36:312-316, (1992)); and metalloproteinase inhibitors such as BB94.

[0645] Additional anti-angiogenic factors that may also be utilized within the context of the present invention include Thalidomide, (Celgene, Warren, N.J.); Angiostatic steroid; AGM-1470 (H. Brem and J. Folkman J Pediatr. Surg. 28:445-51 (1993)); an integrin alpha v beta 3 antagonist (C. Storgard et al., J. Clin. Invest. 103:47-54 (1999)); carboxynaminolmidazole; Carboxyamidotriazole (CAI) (National Cancer Institute, Bethesda, Md.); Conbretastatin A-4 (CA4P) (OXiGENE, Boston, Mass.); Squalamine (Magainin Pharmaceuticals, Plymouth Meeting, Pa.); TNP-470, (Tap Pharmaceuticals, Deerfield, Ill.); ZD-0101 AstraZeneca (London, UK); APRA (CT2584); Benefin, Byrostatin-1 (SC339555); CGP-41251 (PKC 412); CM101; Dexrazoxane (ICRF187); DMXAA; Endostatin; Flavopridiol; Genestein; GTE; ImmTher; Iressa (ZD1839); Octreotide (Somatostatin); Panretin; Penacillamine; Photopoint; PI-88; Prinomastat (AG-3340) Purlytin; Suradista (FCE26644); Tamoxifen (Nolvadex); Tazarotene; Tetrathiomolybdate; Xeloda (Capecitabine); and 5-Fluorouracil.

[0646] Anti-angiogenic agents that may be administered in combination with the compounds of the invention may work through a variety of mechanisms including, but not limited to, inhibiting proteolysis of the extracellular matrix, blocking the function of endothelial cell-extracellular matrix adhesion molecules, by antagonizing the function of angiogenesis inducers such as growth factors, and inhibiting integrin receptors expressed on proliferating endothelial cells. Examples of anti-angiogenic inhibitors that interfere with extracellular matrix proteolysis and which may be administered in combination with the compositions of the invention include, but are not limited to, AG-3340 (Agouron, La Jolla, Calif.), BAY-12-9566 (Bayer, West Haven, Conn.), BMS-275291 (Bristol Myers Squibb, Princeton, N.J.), CGS-27032A (Novartis, East Hanover, N.J.), Marimastat (British Biotech, Oxford, UK), and Metastat (Aeterna, St-Foy, Quebec). Examples of anti-angiogenic inhibitors that act by blocking the function of endothelial cell-extracellular matrix adhesion molecules and which may be administered in combination with the compositions of the invention include, but are not limited to, EMD-121974 (Merck KcgaA Darmstadt, Germany) and Vitaxin (Ixsys, La Jolla, Calif./Medimmune, Gaithersburg, Md.). Examples of anti-angiogenic agents that act by directly antagonizing or inhibiting angiogenesis inducers and which may be administered in combination with the compositions of the invention include, but are not limited to, Angiozyme (Ribozyme, Boulder, Colo.), Anti-VEGF antibody (Genentech, S. San Francisco, Calif.), PTK-787/ZK-225846 (Novartis, Basel, Switzerland), SU-101 (Sugen, S. San Francisco, Calif.), SU-5416 (Sugen/Pharmacia Upjohn, Bridgewater, N.J.), and SU-6668 (Sugen). Other anti-angiogenic agents act to indirectly inhibit angiogenesis. Examples of indirect inhibitors of angiogenesis which may be administered in combination with the compositions of the invention include, but are not limited to, IM-862 (Cytran, Kirkland, Wash.), Interferon-alpha, IL-12 (Roche, Nutley, N.J.), and Pentosan polysulfate (Georgetown University, Washington, D.C.).

[0647] In particular embodiments, the use of compositions of the invention in combination with anti-angiogenic agents is contemplated for the treatment, prevention, and/or amelioration of an autoimmune disease, such as for example, an autoimmune disease described herein.

[0648] In a particular embodiment, the use of compositions of the invention in combination with anti-angiogenic agents is contemplated for the treatment, prevention, and/or amelioration of arthritis. In a more particular embodiment, the use of compositions of the invention in combination with anti-angiogenic agents is contemplated for the treatment, prevention, and/or amelioration of rheumatoid arthritis.

[0649] In another embodiment, the polynucleotides encoding a polypeptide of the present invention are administered in combination with an angiogenic protein, or polynucleotides encoding an angiogenic protein. Examples of angiogenic proteins that may be administered with the compositions of the invention include, but are not limited to, acidic and basic fibroblast growth factors, VEGF-1, VEGF-2, VEGF-3, epidermal growth factor alpha and beta, platelet-derived endothelial cell growth factor, platelet-derived growth factor, tumor necrosis factor alpha, hepatocyte growth factor, insulin-like growth factor, colony stimulating factor, macrophage colony stimulating factor, granulocyte/macrophage colony stimulating factor, and nitric oxide synthase.

[0650] In additional embodiments, compositions of the invention are administered in combination with a chemotherapeutic agent. Chemotherapeutic agents that may be administered with the albumin fusion proteins and/or polynucleotides of the invention include, but are not limited to alkylating agents such as nitrogen mustards (for example, Mechlorethamine, cyclophosphamide, Cyclophosphamide Ifosfamide, Melphalan (L-sarcolysin), and Chlorambucil), ethylenimines and methylmelamines (for example, Hexamethylmelamine and Thiotepa), alkyl sulfonates (for example, Busulfan), nitrosoureas (for example, Carmustine (BCNU), Lomustine (CCNU), Semustine (methyl-CCNU), and Streptozocin (streptozotocin)), triazenes (for example, Dacarbazine (DTIC; dimethyltriazenoimidazolecarboxamide)), folic acid analogs (for example, Methotrexate (amethopterin)), pyrimidine analogs (for example, fluorouracil (5-fluorouracil; 5-FU), Floxuridine (fluorodeoxyuridine; FudR), and Cytarabine (cytosine arabinoside)), purine analogs and related inhibitors (for example, Mercaptopurine (6-mercaptopurine; 6-MP), Thioguanine (6-thioguanine; TG), and Pentostatin (2′-deoxycoformycin)), vinca alkaloids (for example, Vinblastine (VLB, vinblastine sulfate)) and Vincristine (vincristine sulfate)), epipodophyllotoxins (for example, Etoposide and Teniposide), antibiotics (for example, Dactinomycin (actinomycin D), Daunorubicin (daunomycin; rubidomycin), Doxorubicin, Bleomycin, Plicamycin (mithramycin), and Mitomycin (mitomycin C), enzymes (for example, L-Asparaginase), biological response modifiers (for example, Interferon-alpha and interferon-alpha-2b), platinum coordination compounds (for example, Cisplatin (cis-DDP) and Carboplatin), anthracenedione (Mitoxantrone), substituted ureas (for example, Hydroxyurea), methylhydrazine derivatives (for example, Procarbazine (N-methylhydrazine; MIH), adrenocorticosteroids (for example, Prednisone), progestins (for example, Hydroxyprogesterone caproate, Medroxyprogesterone, Medroxyprogesterone acetate, and Megestrol acetate), estrogens (for example, Diethylstilbestrol (DES), Diethylstilbestrol diphosphate, Estradiol, and Ethinyl estradiol), antiestrogens (for example, Tamoxifen), androgens (Testosterone proprionate, and Fluoxymesterone), antiandrogens (for example, Flutamide), gonadotropin-releasing hormone analogs (for example, Leuprolide), other hormones and hormone analogs (for example, methyltestosterone, estramustine, estramustine phosphate sodium, chlorotrianisene, and testolactone), and others (for example, dicarbazine, glutamic acid, and mitotane).

[0651] In one embodiment, the compositions of the invention are administered in combination with one or more of the following drugs: infliximab (also known as Remicade™ Centocor, Inc.), Trocade (Roche, RO-32-3555), Leflunomide (also known as Arava™ from Hoechst Marion Roussel), Kineret™ (an IL-1 Receptor antagonist also known as Anakinra from Amgen, Inc.)

[0652] In a specific embodiment, compositions of the invention are administered in combination with CHOP (cyclophosphamide, doxorubicin, vincristine, and prednisone) or combination of one or more of the components of CHOP. In one embodiment, the compositions of the invention are administered in combination with anti-CD20 antibodies, human monoclonal anti-CD20 antibodies. In another embodiment, the compositions of the invention are administered in combination with anti-CD20 antibodies and CHOP, or anti-CD20 antibodies and any combination of one or more of the components of CHOP, particularly cyclophosphamide and/or prednisone. In a specific embodiment, compositions of the invention are administered in combination with Rituximab. In a further embodiment, compositions of the invention are administered with Rituximab and CHOP, or Rituximab and any combination of one or more of the components of CHOP, particularly cyclophosphamide and/or prednisone. In a specific embodiment, compositions of the invention are administered in combination with tositumomab. In a further embodiment, compositions of the invention are administered with tositumomab and CHOP, or tositumomab and any combination of one or more of the components of CHOP, particularly cyclophosphamide and/or prednisone. The anti-CD20 antibodies may optionally be associated with radioisotopes, toxins or cytotoxic prodrugs.

[0653] In another specific embodiment, the compositions of the invention are administered in combination Zevalin™. In a further embodiment, compositions of the invention are administered with Zevalin™ and CHOP, or Zevalin™ and any combination of one or more of the components of CHOP, particularly cyclophosphamide and/or prednisone. Zevalin™ may be associated with one or more radioisotopes. Particularly preferred isotopes are ⁹⁰Y and ¹¹¹In.

[0654] In an additional embodiment, the albumin fusion proteins and/or polynucleotides of the invention are administered in combination with cytokines. Cytokines that may be administered with the albumin fusion proteins and/or polynucleotides of the invention include, but are not limited to, IL2, IL3, IL4, IL5, IL6, IL7, IL10, IL12, IL13, IL15, anti-CD40, CD40L, IFN-gamma and TNF-alpha. In another embodiment, albumin fusion proteins and/or polynucleotides of the invention may be administered with any interleukin, including, but not limited to, IL-1 alpha, IL-1beta, IL-2, IL-3, IL-4, IL-5, IL-6, IL-7, IL-8, IL-9, IL-10, IL-11, IL-12, IL-13, IL-14, IL-15, IL-16, IL-17, IL-18, IL-19, IL-20, and IL-21.

[0655] In one embodiment, the albumin fusion proteins and/or polynucleotides of the invention are administered in combination with members of the TNF family. TNF, TNF-related or TNF-like molecules that may be administered with the albumin fusion proteins and/or polynucleotides of the invention include, but are not limited to, soluble forms of TNF-alpha, lymphotoxin-alpha (LT-alpha, also known as TNF-beta), LT-beta (found in complex heterotrimer LT-alpha2-beta), OPGL, FasL, CD27L, CD30L, CD40L, 4-1BBL, DcR3, OX40L, TNF-gamma (International Publication No. WO 96/14328), AIM-I (International Publication No. WO 97/33899), endokine-alpha (International Publication No. WO 98/07880), OPG, and neutrokine-alpha (International Publication No. WO 98/18921, OX40, and nerve growth factor (NGF), and soluble forms of Fas, CD30, CD27, CD40 and 4-IBB, TR2 (International Publication No. WO 96/34095), DR3 (International Publication No. WO 97/33904), DR4 (International Publication No. WO 98/32856), TR5 (International Publication No. WO 98/30693), TRANK, TR9 (International Publication No. WO 98/56892), TR10 (International Publication No. WO 98/54202), 312C2 (International Publication No. WO 98/06842), and TR12, and soluble forms CD154, CD70, and CD153.

[0656] In an additional embodiment, the albumin fusion proteins and/or polynucleotides of the invention are administered in combination with angiogenic proteins. Angiogenic proteins that may be administered with the albumin fusion proteins and/or polynucleotides of the invention include, but are not limited to, Glioma Derived Growth Factor (GDGF), as disclosed in European Patent Number EP-399816; Platelet Derived Growth Factor-A (PDGF-A), as disclosed in European Patent Number EP-682110; Platelet Derived Growth Factor-B (PDGF-B), as disclosed in European Patent Number EP-282317; Placental Growth Factor (P1GF), as disclosed in International Publication Number WO 92/06194; Placental Growth Factor-2 (P1GF-2), as disclosed in Hauser et al., Growth Factors, 4:259-268 (1993); Vascular Endothelial Growth Factor (VEGF), as disclosed in International Publication Number WO 90/13649; Vascular Endothelial Growth Factor-A (VEGF-A), as disclosed in European Patent Number EP-506477; Vascular Endothelial Growth Factor-2 (VEGF-2), as disclosed in International Publication Number WO 96/39515; Vascular Endothelial Growth Factor B (VEGF-3); Vascular Endothelial Growth Factor B-186 (VEGF-B186), as disclosed in International Publication Number WO 96/26736; Vascular Endothelial Growth Factor-D (VEGF-D), as disclosed in International Publication Number WO 98/02543; Vascular Endothelial Growth Factor-D (VEGF-D), as disclosed in International Publication Number WO 98/07832; and Vascular Endothelial Growth Factor-E (VEGF-E), as disclosed in German Patent Number DE19639601. The above mentioned references are herein incorporated by reference in their entireties.

[0657] In an additional embodiment, the albumin fusion proteins and/or polynucleotides of the invention are administered in combination with Fibroblast Growth Factors. Fibroblast Growth Factors that may be administered with the albumin fusion proteins and/or polynucleotides of the invention include, but are not limited to, FGF-1, FGF-2, FGF-3, FGF-4, FGF-5, FGF-6, FGF-7, FGF-8, FGF-9, FGF-10, FGF-11, FGF-12, FGF-13, FGF-14, and FGF-15.

[0658] In an additional embodiment, the albumin fusion proteins and/or polynucleotides of the invention are administered in combination with hematopoietic growth factors. Hematopoietic growth factors that may be administered with the albumin fusion proteins and/or polynucleotides of the invention include, but are not limited to, granulocyte macrophage colony stimulating factor (GM-CSF) (sargramostim, LEUKINE™, PROKINE™), granulocyte colony stimulating factor (G-CSF) (filgrastim, NEUPOGEN™), macrophage colony stimulating factor (M-CSF, CSF-1) erythropoietin (epoetin alfa, EPOGEN™, PROCRIT™), stem cell factor (SCF, c-kit ligand, steel factor), megakaryocyte colony stimulating factor, PIXY321 (a GMCSF/IL-3 fusion protein), interleukins, especially any one or more of IL-1 through IL-12, interferon-gamma, or thrombopoietin.

[0659] In certain embodiments, albumin fusion proteins and/or polynucleotides of the present invention are administered in combination with adrenergic blockers, such as, for example, acebutolol, atenolol, betaxolol, bisoprolol, carteolol, labetalol, metoprolol, nadolol, oxprenolol, penbutolol, pindolol, propranolol, sotalol, and timolol.

[0660] In another embodiment, the albumin fusion proteins and/or polynucleotides of the invention are administered in combination with an antiarrhythmic drug (e.g., adenosine, amidoarone, bretylium, digitalis, digoxin, digitoxin, diliazem, disopyramide, esmolol, flecamide, lidocaine, mexiletine, moricizine, phenyloin, procainamide, N-acetyl procainamide, propafenone, propranolol, quinidine, sotalol, tocamide, and verapamil).

[0661] In another embodiment, the albumin fusion proteins and/or polynucleotides of the invention are administered in combination with diuretic agents, such as carbonic anhydrase-inhibiting agents (e.g., acetazolamide, dichlorphenamide, and methazolamide), osmotic diuretics (e.g., glycerin, isosorbide, mannitol, and urea), diuretics that inhibit Na⁺—K⁺-2Cl⁻ symport (e.g., furosemide, bumetamide, azosemide, piretanide, tripamide, ethacrynic acid, muzolimine, and torsemide), thiazide and thiazide-like diuretics (e.g., bendroflumethiazide, benzthiazide, chlorothiazide, hydrochlorothiazide, hydroflumethiazide, methyclothiazide, polythiazide, trichormethiazide, chlorthalidone, indapamide, metolazone, and quinethazone), potassium sparing diuretics (e.g., amiloride and triamterene), and mineralcorticoid receptor antagonists (e.g., spironolactone, canrenone, and potassium canrenoate).

[0662] In one embodiment, the albumin fusion proteins and/or polynucleotides of the invention are administered in combination with treatments for endocrine and/or hormone imbalance disorders. Treatments for endocrine and/or hormone imbalance disorders include, but are not limited to, ¹²⁷I, radioactive isotopes of iodine such as ¹³¹I and ¹²³I; recombinant growth hormone, such as HUMATROPE™ (recombinant somatropin); growth hormone analogs such as PROTROPIN™ (somatrem); dopamine agonists such as PARLODEL™ (bromocriptine); somatostatin analogs such as SANDOSTATIN™ (octreotide); gonadotropin preparations such as PREGNYL™, A.P.L.™ and PROFASI™ (chorionic gonadotropin (CG)), PERGONAL™ (menotropins), and METRODIN™ (urofollitropin (uFSH)); synthetic human gonadotropin releasing hormone preparations such as FACTREL™ and LUTREPULSE™ (gonadorelin hydrochloride); synthetic gonadotropin agonists such as LUPRON™ (leuprolide acetate), SUPPRELIN™ (histrelin acetate), SYNAREL™ (nafarelin acetate), and ZOLADEX™ (goserelin acetate); synthetic preparations of thyrotropin-releasing hormone such as RELEFACT TRH™ and THYPINONE™ (protirelin); recombinant human TSH such as THYROGEN™; synthetic preparations of the sodium salts of the natural isomers of thyroid hormones such as L-T₄™, SYNTHROID™ and LEVOTHROID™ (levothyroxine sodium), L-T₃, CYTOMEL™ and TRIOSTAT™ (liothyroine sodium), and THYROLAR™ (liotrix); antithyroid compounds such as 6-n-propylthiouracil (propylthiouracil), 1-methyl-2-mercaptoimidazole and TAPAZOLE™ (methimazole), NEO-MERCAZOLE™ (carbimazole); beta-adrenergic receptor antagonists such as propranolol and esmolol; Ca²⁺ channel blockers; dexamethasone and iodinated radiological contrast agents such as TELEPAQUE™ (iopanoic acid) and ORAGRAFIN™ (sodium ipodate).

[0663] Additional treatments for endocrine and/or hormone imbalance disorders include, but are not limited to, estrogens or conjugated estrogens such as ESTRACE™ (estradiol), ESTINYL™ (ethinyl estradiol), PREMARIN™, ESTRATAB™, ORTHO-EST™, OGEN™ and estropipate (estrone), ESTROVIS™ (quinestrol), ESTRADERM™ (estradiol), DELESTROGEN™ and VALERGEN™ (estradiol valerate), DEPO-ESTRADIOL CYPIONATE™ and ESTROJECT LA™ (estradiol cypionate); antiestrogens such as NOLVADEX™ (tamoxifen), SEROPHENE™ and CLOMID™ (clomiphene); progestins such as DURALUTIN™ (hydroxyprogesterone caproate), MPA™ and DEPO-PROVERA™ (medroxyprogesterone acetate), PROVERA™ and CYCRIN™ (MPA), MEGACE™ (megestrol acetate), NORLUTIN™ (norethindrone), and NORLUTATE™ and AYGESTIN™ (norethindrone acetate); progesterone implants such as NORPLANT SYSTEM™ (subdermal implants of norgestrel); antiprogestins such as RU 486™ (mifepristone); hormonal contraceptives such as ENOVID™ (norethynodrel plus mestranol), PROGESTASERT™ (intrauterine device that releases progesterone), LOESTRIN™, BREVICON™, MODICON™, GENORA™, NELONA™, NORINYL™, OVACON-35™ and OVACON-50™ (ethinyl estradiol/norethindrone), LEVLEN™, NORDETTE™, TRI-LEVLEN™ and TRIPHASIL-21™ (ethinyl estradiol/levonorgestrel) LO/OVRAL™ and OVRAL™ (ethinyl estradiol/norgestrel), DEMULEN™ (ethinyl estradiol/ethynodiol diacetate), NORINYL™, ORTHO-NOVUM™, NORETHIN™, GENORA™, and NELOVA™ (norethindrone/mestranol), DESOGEN™ and ORTHO-CEPT™ (ethinyl estradiol/desogestrel), ORTHO-CYCLEN™ and ORTHO-TRICYCLEN™ (ethinyl estradiol/norgestimate), MICRONOR™ and NOR-QD™ (norethindrone), and OVRETTE™ (norgestrel).

[0664] Additional treatments for endocrine and/or hormone imbalance disorders include, but are not limited to, testosterone esters such as methenolone acetate and testosterone undecanoate; parenteral and oral androgens such as TESTOJECT-50™ (testosterone), TESTEX™ (testosterone propionate), DELATESTRYL™ (testosterone enanthate), DEPO-TESTOSTERONE™ (testosterone cypionate), DANOCRINE™ (danazol), HALOTESTIN™ (fluoxymesterone), ORETON METHYL™, TESTRED™ and VIRILON™ (methyltestosterone), and OXANDRIN™ (oxandrolone); testosterone transdermal systems such as TESTODERM™; androgen receptor antagonist and 5-alpha-reductase inhibitors such as ANDROCUR™ (cyproterone acetate), EULEXIN™ (flutamide), and PROSCAR™ (finasteride); adrenocorticotropic hormone preparations such as CORTROSYN™ (cosyntropin); adrenocortical steroids and their synthetic analogs such as ACLOVATE™ (alclometasone dipropionate), CYCLOCORT™ (amcinonide), BECLOVENT™ and VANCERIL™ (beclomethasone dipropionate), CELESTONE™ (betamethasone), BENISONE™ and UTICORT™ (betamethasone benzoate), DIPROSONE™ (betamethasone dipropionate), CELESTONE PHOSPHATE™ (betamethasone sodium phosphate), CELESTONE SOLUSPAN™ (betamethasone sodium phosphate and acetate), BETA-VAL™ and VALISONE™ (betamethasone valerate), TEMOVATE™ (clobetasol propionate), CLODERM™ (clocortolone pivalate), CORTEF™ and HYDROCORTONE™ (cortisol (hydrocortisone)), HYDROCORTONE ACETATE™ (cortisol (hydrocortisone) acetate), LOCOID™ (cortisol (hydrocortisone) butyrate), HYDROCORTONE PHOSPHATE™ (cortisol (hydrocortisone) sodium phosphate), A-HYDROCORT™ and SOLU CORTEF™ (cortisol (hydrocortisone) sodium succinate), WESTCORT™ (cortisol (hydrocortisone) valerate), CORTISONE ACETATE™ (cortisone acetate), DESOWEN™ and TRIDESILON™ (desonide), TOPICORT™ (desoximetasone), DECADRON™ (dexamethasone), DECADRON LA™ (dexamethasone acetate), DECADRON PHOSPHATE™ and HEXADROL PHOSPHATE™ (dexamethasone sodium phosphate), FLORONE™ and MAXIFLOR™ (diflorasone diacetate), FLORINEF ACETATE™ (fludrocortisone acetate), AEROBID™ and NASALIDE™ (flunisolide), FLUONID™ and SYNALAR™ (fluocinolone acetonide), LIDEX™ (fluocinonide), FLUOR-OP™ and FML™ (fluorometholone), CORDRAN™ (flurandrenolide), HALOG™ (halcinonide), HMS LIZUIFILM™ (medrysone), MEDROL™ (methylprednisolone), DEPO-MEDROL™ and MEDROL ACETATE™ (methylprednisone acetate), A-METHAPRED™ and SOLUMEDROL™ (methylprednisolone sodium succinate), ELOCON™ (mometasone furoate), HALDRONE™ (paramethasone acetate), DELTA-CORTEF™ (prednisolone), ECONOPRED™ (prednisolone acetate), HYDELTRASOL™ (prednisolone sodium phosphate), HYDELTRA-T.B.A™ (prednisolone tebutate), DELTASONE™ (prednisone), ARISTOCORT™ and KENACORT™ (triamcinolone), KENALOG™ (triamcinolone acetonide), ARISTOCORT™ and KENACORT DIACETATE™ (triamcinolone diacetate), and ARISTOSPAN™ (triamcinolone hexacetonide); inhibitors of biosynthesis and action of adrenocortical steroids such as CYTADREN™ (aminoglutethimide), NIZORAL™ (ketoconazole), MODRASTANE™ (trilostane), and METOPIRONE™ (metyrapone); bovine, porcine or human insulin or mixtures thereof; insulin analogs; recombinant human insulin such as HUMULIN™ and NOVOLIN™; oral hypoglycemic agents such as ORAMIDE™ and ORINASE™ (tolbutamide), DIABINESE™ (chlorpropamide), TOLAMIDE™ and TOLINASE™ (tolazamide), DYMELOR™ (acetohexamide), glibenclamide, MICRONASE™, DIBETA™ and GLYNASE™ (glyburide), GLUCOTROL™ (glipizide), and DIAMICRON™ (gliclazide), GLUCOPHAGE™ (metformin), ciglitazone, pioglitazone, and alpha-glucosidase inhibitors; bovine or porcine glucagon; somatostatins such as SANDOSTATIN™ (octreotide); and diazoxides such as PROGLYCEM™ (diazoxide).

[0665] In one embodiment, the albumin fusion proteins and/or polynucleotides of the invention are administered in combination with treatments for uterine motility disorders. Treatments for uterine motility disorders include, but are not limited to, estrogen drugs such as conjugated estrogens (e.g., PREMARIN® and ESTRATAB®), estradiols (e.g., CLIMARA® and ALORA®), estropipate, and chlorotrianisene; progestin drugs (e.g., AMEN® (medroxyprogesterone), MICRONOR® (norethidrone acetate), PROMETRIUM® progesterone, and megestrol acetate); and estrogen/progesterone combination therapies such as, for example, conjugated estrogens/medroxyprogesterone (e.g., PREMPRO™ and PREMPHASE®) and norethindrone acetate/ethinyl estsradiol (e.g., FEMHRT™).

[0666] In an additional embodiment, the albumin fusion proteins and/or polynucleotides of the invention are administered in combination with drugs effective in treating iron deficiency and hypochromic anemias, including but not limited to, ferrous sulfate (iron sulfate, FEOSOL™), ferrous fumarate (e.g., FEOSTAT™), ferrous gluconate (e.g., FERGON™), polysaccharide-iron complex (e.g., NIFEREX™), iron dextran injection (e.g., INFED™), cupric sulfate, pyroxidine, riboflavin, Vitamin B₁₂, cyancobalarnin injection (e.g., REDISOL™, RUBRAMIN PC™), hydroxocobalamin, folic acid (e.g., FOLVITE™), leucovorin (folinic acid, 5-CHOH4PteGlu, citrovorum factor) or WELLCOVORIN (Calcium salt of leucovorin), transferrin or ferritin.

[0667] In certain embodiments, the albumin fusion proteins and/or polynucleotides of the invention are administered in combination with agents used to treat psychiatric disorders. Psychiatric drugs that may be administered with the albumin fusion proteins and/or polynucleotides of the invention include, but are not limited to, antipsychotic agents (e.g., chlorpromazine, chlorprothixene, clozapine, fluphenazine, haloperidol, loxapine, mesoridazine, molindone, olanzapine, perphenazine, pimozide, quetiapine, risperidone, thioridazine, thiothixene, trifluoperazine, and triflupromazine), antimanic agents (e.g., carbamazepine, divalproex sodium, lithium carbonate, and lithium citrate), antidepressants (e.g., amitriptyline, amoxapine, bupropion, citalopram, clomipramine, desipramine, doxepin, fluvoxamine, fluoxetine, imipramine, isocarboxazid, maprotiline, mirtazapine, nefazodone, nortriptyline, paroxetine, phenelzine, protriptyline, sertraline, tranylcypromine, trazodone, trimipramine, and venlafaxine), antianxiety agents (e.g., alprazolam, buspirone, chlordiazepoxide, clorazepate, diazepam, halazepam, lorazepam, oxazepam, and prazepam), and stimulants (e.g., d-amphetamine, methylphenidate, and pemoline).

[0668] In other embodiments, the albumin fusion proteins and/or polynucleotides of the invention are administered in combination with agents used to treat neurological disorders. Neurological agents that may be administered with the albumin fusion proteins and/or polynucleotides of the invention include, but are not limited to, antiepileptic agents (e.g., carbamazepine, clonazepam, ethosuximide, phenobarbital, phenyloin, primidone, valproic acid, divalproex sodium, felbamate, gabapentin, lamotrigine, levetiracetam, oxcarbazepine, tiagabine, topiramate, zonisamide, diazepam, lorazepam, and clonazepam), antiparkinsonian agents (e.g., levodopa/carbidopa, selegiline, amantidine, bromocriptine, pergolide, ropinirole, pramipexole, benztropine; biperiden; ethopropazine; procyclidine; trihexyphenidyl, tolcapone), and ALS therapeutics (e.g. riluzole).

[0669] In another embodiment, albumin fusion proteins and/or polynucleotides of the invention are administered in combination with vasodilating agents and/or calcium channel blocking agents. Vasodilating agents that may be administered with the albumin fusion proteins and/or polynucleotides of the invention include, but are not limited to, Angiotensin Converting Enzyme (ACE) inhibitors (e.g., papaverine, isoxsuprine, benazepril, captopril, cilazapril, enalapril, enalaprilat, fosinopril, lisinopril, moexipril, perindopril, quinapril, ramipril, spirapril, trandolapril, and nylidrin), and nitrates (e.g., isosorbide dinitrate, isosorbide mononitrate, and nitroglycerin). Examples of calcium channel blocking agents that may be administered in combination with the albumin fusion proteins and/or polynucleotides of the invention include, but are not limited to amlodipine, bepridil, diltiazem, felodipine, flunarizine, isradipine, nicardipine, nifedipine, nimodipine, and verapamil.

[0670] In certain embodiments, the albumin fusion proteins and/or polynucleotides of the invention are administered in combination with treatments for gastrointestinal disorders. Treatments for gastrointestinal disorders that may be administered with the albumin fusion protein and/or polynucleotide of the invention include, but are not limited to, H₂ histamine receptor antagonists (e.g., TAGAMET™ (cimetidine), ZANTAC™ (ranitidine), PEPCID™ (famotidine), and AXID™ (nizatidine)); inhibitors of H⁺, K⁺ ATPase (e.g., PREVACID™ (lansoprazole) and PRILOSEC™ (omeprazole)); Bismuth compounds (e.g., PEPTO-BISMOL™ (bismuth subsalicylate) and DE-NOL™ (bismuth subcitrate)); various antacids; sucralfate; prostaglandin analogs (e.g. CYTOTEC™ (misoprostol)); muscarinic cholinergic antagonists; laxatives (e.g., surfactant laxatives, stimulant laxatives, saline and osmotic laxatives); antidiarrheal agents (e.g., LOMOTIL™ (diphenoxylate), MOTOFEN™ (diphenoxin), and IMODIUM™ (loperamide hydrochloride)), synthetic analogs of somatostatin such as SANDOSTATIN™ (octreotide), antiemetic agents (e.g., ZOFRAN™ (ondansetron), KYTRIL™ (granisetron hydrochloride), tropisetron, dolasetron, metoclopramide, chlorpromazine, perphenazine, prochlorperazine, promethazine, thiethylperazine, triflupromazine, domperidone, haloperidol, droperidol, trimethobenzamide, dexamethasone, methylprednisolone, dronabinol, and nabilone); D2 antagonists (e.g., metoclopramide, trimethobenzamide and chlorpromazine); bile salts; chenodeoxycholic acid; ursodeoxycholic acid; and pancreatic enzyme preparations such as pancreatin and pancrelipase.

[0671] In additional embodiments, the albumin fusion proteins and/or polynucleotides of the invention are administered in combination with other therapeutic or prophylactic regimens, such as, for example, radiation therapy.

[0672] The invention also provides a pharmaceutical pack or kit comprising one or more containers filled with one or more of the ingredients of the pharmaceutical compositions comprising albumin fusion proteins of the invention. Optionally associated with such container(s) can be a notice in the form prescribed by a governmental agency regulating the manufacture, use or sale of pharmaceuticals or biological products, which notice reflects approval by the agency of manufacture, use or sale for human administration.

[0673] Gene Therapy

[0674] Constructs encoding albumin fusion proteins of the invention can be used as a part of a gene therapy protocol to deliver therapeutically effective doses of the albumin fusion protein. A preferred approach for in vivo introduction of nucleic acid into a cell is by use of a viral vector containing nucleic acid, encoding an albumin fusion protein of the invention. Infection of cells with a viral vector has the advantage that a large proportion of the targeted cells can receive the nucleic acid. Additionally, molecules encoded within the viral vector, e.g., by a cDNA contained in the viral vector, are expressed efficiently in cells which have taken up viral vector nucleic acid.

[0675] Retrovirus vectors and adeno-associated virus vectors can be used as a recombinant gene delivery system for the transfer of exogenous nucleic acid molecules encoding albumin fusion proteins in vivo. These vectors provide efficient delivery of nucleic acids into cells, and the transferred nucleic acids are stably integrated into the chromosomal DNA of the host. The development of specialized cell lines (termed “packaging cells”) which produce only replication-defective retroviruses has increased the utility of retroviruses for gene therapy, and defective retroviruses are characterized for use in gene transfer for gene therapy purposes (for a review see Miller, A. D. (1990) Blood 76:271). A replication defective retrovirus can be packaged into virions which can be used to infect a target cell through the use of a helper virus by standard techniques. Protocols for producing recombinant retroviruses and for infecting cells in vitro or in vivo with such viruses can be found in Current Protocols in Molecular Biology, Ausubel, F. M. et al., (eds.) Greene Publishing Associates, (1989), Sections 9.10-9.14 and other standard laboratory manuals.

[0676] Another viral gene delivery system useful in the present invention uses adenovirus-derived vectors. The genome of an adenovirus can be manipulated such that it encodes and expresses a gene product of interest but is inactivated in terms of its ability to replicate in a normal lytic viral life cycle. See, for example, Berkner et al., BioTechniques 6:616 (1988); Rosenfeld et al., Science 252:431-434 (1991); and Rosenfeld et al., Cell 68:143-155 (1992). Suitable adenoviral vectors derived from the adenovirus strain Ad type 5 d1324 or other strains of adenovirus (e.g., Ad2, Ad3, Ad7 etc.) are known to those skilled in the art. Recombinant adenoviruses can be advantageous in certain circumstances in that they are not capable of infecting nondividing cells and can be used to infect a wide variety of cell types, including epithelial cells (Rosenfeld et al., (1992) cited supra). Furthermore, the virus particle is relatively stable and amenable to purification and concentration, and as above, can be modified so as to affect the spectrum of infectivity. Additionally, introduced adenoviral DNA (and foreign DNA contained therein) is not integrated into the genome of a host cell but remains episomal, thereby avoiding potential problems that can occur as a result of insertional mutagenesis in situations where introduced DNA becomes integrated into the host genome (e.g., retroviral DNA). Moreover, the carrying capacity of the adenoviral genome for foreign DNA is large (up to 8 kilobases) relative to other gene delivery vectors (Berkner et al., cited supra; Haj-Ahmand et al., J. Virol. 57:267 (1986)).

[0677] In another embodiment, non-viral gene delivery systems of the present invention rely on endocytic pathways for the uptake of the subject nucleotide molecule by the targeted cell. Exemplary gene delivery systems of this type include liposomal derived systems, poly-lysine conjugates, and artificial viral envelopes. In a representative embodiment, a nucleic acid molecule encoding an albumin fusion protein of the invention can be entrapped in liposomes bearing positive charges on their surface (e.g., lipofectins) and (optionally) which are tagged with antibodies against cell surface antigens of the target tissue (Mizuno et al. (1992) No Shinkei Geka 20:547-5 5 1; PCT publication WO91/06309; Japanese patent application 1047381; and European patent publication EP-A-43075).

[0678] Gene delivery systems for a gene encoding an albumin fusion protein of the invention can be introduced into a patient by any of a number of methods. For instance, a pharmaceutical preparation of the gene delivery system can be introduced systemically, e.g. by intravenous injection, and specific transduction of the protein in the target cells occurs predominantly from specificity of transfection provided by the gene delivery vehicle, cell-type or tissue-type expression due to the transcriptional regulatory sequences controlling expression of the receptor gene, or a combination thereof. In other embodiments, initial delivery of the recombinant gene is more limited with introduction into the animal being quite localized. For example, the gene delivery vehicle can be introduced by catheter (see U.S. Pat. No. 5,328,470) or by Stereotactic injection (e.g. Chen et al. (1994) PNAS 91: 3 054-3 05 7). The pharmaceutical preparation of the gene therapy construct can consist essentially of the gene delivery system in an acceptable diluent, or can comprise a slow release matrix in which the gene delivery vehicle is imbedded. Where the albumin fusion protein can be produced intact from recombinant cells, e.g. retroviral vectors, the pharmaceutical preparation can comprise one or more cells which produce the albumin fusion protein.

[0679] Additional Gene Therapy Methods

[0680] Also encompassed by the invention are gene therapy methods for treating or preventing disorders, diseases and conditions. The gene therapy methods relate to the introduction of nucleic acid (DNA, RNA and antisense DNA or RNA) sequences into an animal to achieve expression of an albumin fusion protein of the invention. This method requires a polynucleotide which codes for an albumin fusion protein of the present invention operatively linked to a promoter and any other genetic elements necessary for the expression of the fusion protein by the target tissue. Such gene therapy and delivery techniques are known in the art, see, for example, WO90/11092, which is herein incorporated by reference.

[0681] Thus, for example, cells from a patient may be engineered with a polynucleotide (DNA or RNA) comprising a promoter operably linked to a polynucleotide encoding an albumin fusion protein of the present invention ex vivo, with the engineered cells then being provided to a patient to be treated with the fusion protein of the present invention. Such methods are well-known in the art. For example, see Belldegrun, A., et al., J. Natl. Cancer Inst. 85: 207-216 (1993); Ferrantini, M. et al., Cancer Research 53: 1107-1112 (1993); Ferrantini, M. et al., J. Immunology 153: 4604-4615 (1994); Kaido, T., et al., Int. J. Cancer 60: 221-229 (1995); Ogura, H., et al., Cancer Research 50: 5102-5106 (1990); Santodonato, L., et al., Human Gene Therapy 7:1-10 (1996); Santodonato, L., et al., Gene Therapy 4:1246-1255 (1997); and Zhang, J.-F. et al., Cancer Gene Therapy 3: 31-38 (1996)), which are herein incorporated by reference. In one embodiment, the cells which are engineered are arterial cells. The arterial cells may be reintroduced into the patient through direct injection to the artery, the tissues surrounding the artery, or through catheter injection.

[0682] As discussed in more detail below, the polynucleotide constructs can be delivered by any method that delivers injectable materials to the cells of an animal, such as, injection into the interstitial space of tissues (heart, muscle, skin, lung, liver, and the like). The polynucleotide constructs may be delivered in a pharmaceutically acceptable liquid or aqueous carrier.

[0683] In one embodiment, polynucleotides encoding the albumin fusion proteins of the present invention is delivered as a naked polynucleotide. The term “naked” polynucleotide, DNA or RNA refers to sequences that are free from any delivery vehicle that acts to assist, promote or facilitate entry into the cell, including viral sequences, viral particles, liposome formulations, lipofectin or precipitating agents and the like. However, polynucleotides encoding the albumin fusion proteins of the present invention can also be delivered in liposome formulations and lipofectin formulations and the like can be prepared by methods well known to those skilled in the art. Such methods are described, for example, in U.S. Pat. Nos. 5,593,972, 5,589,466, and 5,580,859, which are herein incorporated by reference.

[0684] The polynucleotide vector constructs used in the gene therapy method are preferably constructs that will not integrate into the host genome nor will they contain sequences that allow for replication. Appropriate vectors include pWLNEO, pSV2CAT, pOG44, pXT1 and pSG available from Stratagene; pSVK3, pBPV, pMSG and pSVL available from Pharmacia; and pEF1V5, pcDNA3.1, and pRC/CMV2 available from Invitrogen. Other suitable vectors will be readily apparent to the skilled artisan.

[0685] Any strong promoter known to those skilled in the art can be used for driving the expression of the polynucleotide sequence. Suitable promoters include adenoviral promoters, such as the adenoviral major late promoter; or heterologous promoters, such as the cytomegalovirus (CMV) promoter; the respiratory syncytial virus (RSV) promoter; inducible promoters, such as the MMT promoter, the metallothionein promoter; heat shock promoters; the albumin promoter; the ApoAI promoter; human globin promoters; viral thymidine kinase promoters, such as the Herpes Simplex thymidine kinase promoter; retroviral LTRs; the b-actin promoter; and human growth hormone promoters. The promoter also may be the native promoter for the gene corresponding to the Therapeutic protein portion of the albumin fusion proteins of the invention.

[0686] Unlike other gene therapy techniques, one major advantage of introducing naked nucleic acid sequences into target cells is the transitory nature of the polynucleotide synthesis in the cells. Studies have shown that non-replicating DNA sequences can be introduced into cells to provide production of the desired polypeptide for periods of up to six months.

[0687] The polynucleotide construct can be delivered to the interstitial space of tissues within the an animal, including of muscle, skin, brain, lung, liver, spleen, bone marrow, thymus, heart, lymph, blood, bone, cartilage, pancreas, kidney, gall bladder, stomach, intestine, testis, ovary, uterus, rectum, nervous system, eye, gland, and connective tissue. Interstitial space of the tissues comprises the intercellular, fluid, mucopolysaccharide matrix among the reticular fibers of organ tissues, elastic fibers in the walls of vessels or chambers, collagen fibers of fibrous tissues, or that same matrix within connective tissue ensheathing muscle cells or in the lacunae of bone. It is similarly the space occupied by the plasma of the circulation and the lymph fluid of the lymphatic channels. Delivery to the interstitial space of muscle tissue is preferred for the reasons discussed below. They may be conveniently delivered by injection into the tissues comprising these cells. They are preferably delivered to and expressed in persistent, non-dividing cells which are differentiated, although delivery and expression may be achieved in non-differentiated or less completely differentiated cells, such as, for example, stem cells of blood or skin fibroblasts. In vivo muscle cells are particularly competent in their ability to take up and express polynucleotides.

[0688] For the naked nucleic acid sequence injection, an effective dosage amount of DNA or RNA will be in the range of from about 0.05 mg/kg body weight to about 50 mg/kg body weight. Preferably the dosage will be from about 0.005 mg/kg to about 20 mg/kg and more preferably from about 0.05 mg/kg to about 5 mg/kg. Of course, as the artisan of ordinary skill will appreciate, this dosage will vary according to the tissue site of injection. The appropriate and effective dosage of nucleic acid sequence can readily be determined by those of ordinary skill in the art and may depend on the condition being treated and the route of administration.

[0689] The preferred route of administration is by the parenteral route of injection into the interstitial space of tissues. However, other parenteral routes may also be used, such as, inhalation of an aerosol formulation particularly for delivery to lungs or bronchial tissues, throat or mucous membranes of the nose. In addition, naked DNA constructs can be delivered to arteries during angioplasty by the catheter used in the procedure.

[0690] The naked polynucleotides are delivered by any method known in the art, including, but not limited to, direct needle injection at the delivery site, intravenous injection, topical administration, catheter infusion, and so-called “gene guns”. These delivery methods are known in the art.

[0691] The constructs may also be delivered with delivery vehicles such as viral sequences, viral particles, liposome formulations, lipofectin, precipitating agents, etc. Such methods of delivery are known in the art.

[0692] In certain embodiments, the polynucleotide constructs are complexed in a liposome preparation. Liposomal preparations for use in the instant invention include cationic (positively charged), anionic (negatively charged) and neutral preparations. However, cationic liposomes are particularly preferred because a tight charge complex can be formed between the cationic liposome and the polyanionic nucleic acid. Cationic liposomes have been shown to mediate intracellular delivery of plasmid DNA (Felgner et al., Proc. Natl. Acad. Sci. USA (1987) 84:7413-7416, which is herein incorporated by reference); mRNA (Malone et al., Proc. Natl. Acad. Sci. USA (1989) 86:6077-6081, which is herein incorporated by reference); and purified transcription factors (Debs et al., J. Biol. Chem. (1990) 265:10189-10192, which is herein incorporated by reference), in functional form.

[0693] Cationic liposomes are readily available. For example, N[1-2,3-dioleyloxy)propyl]-N,N,N-triethylammonium (DOTMA) liposomes are particularly useful and are available under the trademark Lipofectin, from GIBCO BRL, Grand Island, N.Y. (See, also, Felgner et al., Proc. Natl. Acad. Sci. USA (1987) 84:7413-7416, which is herein incorporated by reference). Other commercially available liposomes include transfectace (DDAB/DOPE) and DOTAP/DOPE (Boehringer).

[0694] Other cationic liposomes can be prepared from readily available materials using techniques well known in the art. See, e.g. PCT Publication No. WO 90/11092 (which is herein incorporated by reference) for a description of the synthesis of DOTAP (1,2-bis(oleoyloxy)-3-(trimethylammonio)propane) liposomes. Preparation of DOTMA liposomes is explained in the literature, see, e.g., P. Felgner et al., Proc. Natl. Acad. Sci. USA 84:7413-7417, which is herein incorporated by reference. Similar methods can be used to prepare liposomes from other cationic lipid materials.

[0695] Similarly, anionic and neutral liposomes are readily available, such as from Avanti Polar Lipids (Birmingham, Ala.), or can be easily prepared using readily available materials. Such materials include phosphatidyl, choline, cholesterol, phosphatidyl ethanolamine, dioleoylphosphatidyl choline (DOPC), dioleoylphosphatidyl glycerol (DOPG), dioleoylphosphatidyl ethanolamine (DOPE), among others. These materials can also be mixed with the DOTMA and DOTAP starting materials in appropriate ratios. Methods for making liposomes using these materials are well known in the art.

[0696] For example, commercially dioleoylphosphatidyl choline (DOPC), dioleoylphosphatidyl glycerol (DOPG), and dioleoylphosphatidyl ethanolamine (DOPE) can be used in various combinations to make conventional liposomes, with or without the addition of cholesterol. Thus, for example, DOPG/DOPC vesicles can be prepared by drying 50 mg each of DOPG and DOPC under a stream of nitrogen gas into a sonication vial. The sample is placed under a vacuum pump overnight and is hydrated the following day with deionized water. The sample is then sonicated for 2 hours in a capped vial, using a Heat Systems model 350 sonicator equipped with an inverted cup (bath type) probe at the maximum setting while the bath is circulated at 15 degrees celcius. Alternatively, negatively charged vesicles can be prepared without sonication to produce multilamellar vesicles or by extrusion through nucleopore membranes to produce unilamellar vesicles of discrete size. Other methods are known and available to those of skill in the art.

[0697] The liposomes can comprise multilamellar vesicles (MLVs), small unilamellar vesicles (SUVs), or large unilamellar vesicles (LUVs), with SUVs being preferred. The various liposome-nucleic acid complexes are prepared using methods well known in the art. See, e.g., Straubinger et al., Methods of Immunology (1983), 101:512-527, which is herein incorporated by reference. For example, MLVs containing nucleic acid can be prepared by depositing a thin film of phospholipid on the walls of a glass tube and subsequently hydrating with a solution of the material to be encapsulated. SUVs are prepared by extended sonication of MLVs to produce a homogeneous population of unilamellar liposomes. The material to be entrapped is added to a suspension of preformed MLVs and then sonicated. When using liposomes containing cationic lipids, the dried lipid film is resuspended in an appropriate solution such as sterile water or an isotonic buffer solution such as 10 mM Tris/NaCl, sonicated, and then the preformed liposomes are mixed directly with the DNA. The liposome and DNA form a very stable complex due to binding of the positively charged liposomes to the cationic DNA. SUVs find use with small nucleic acid fragments. LUVs are prepared by a number of methods, well known in the art. Commonly used methods include Ca²⁺-EDTA chelation (Papahadjopoulos et al., Biochim. Biophys. Acta (1975) 394:483; Wilson et al., Cell 17:77 (1979)); ether injection (Deamer, D. and Bangham, A., Biochim. Biophys. Acta 443:629 (1976); Ostro et al., Biochem. Biophys. Res. Commun. 76:836 (1977); Fraley et al., Proc. Natl. Acad. Sci. USA 76:3348 (1979)); detergent dialysis (Enoch, H. and Strittmatter, P., Proc. Natl. Acad. Sci. USA 76:145 (1979)); and reverse-phase evaporation (REV) (Fraley et al., J. Biol. Chem. 255:10431 (1980); Szoka, F. and Papahadjopoulos, D., Proc. Natl. Acad. Sci. USA 75:145 (1978); Schaefer-Ridder et al., Science 215:166 (1982)), which are herein incorporated by reference.

[0698] Generally, the ratio of DNA to liposomes will be from about 10:1 to about 1:10. Preferably, the ration will be from about 5:1 to about 1:5. More preferably, the ration will be about 3:1 to about 1:3. Still more preferably, the ratio will be about 1:1.

[0699] U.S. Pat. No. 5,676,954 (which is herein incorporated by reference) reports on the injection of genetic material, complexed with cationic liposomes carriers, into mice. U.S. Pat. Nos. 4,897,355, 4,946,787, 5,049,386, 5,459,127, 5,589,466, 5,693,622, 5,580,859, 5,703,055, and international publication no. WO 94/9469 (which are herein incorporated by reference) provide cationic lipids for use in transfecting DNA into cells and mammals. U.S. Pat. Nos. 5,589,466, 5,693,622, 5,580,859, 5,703,055, and international publication no. WO 94/9469 provide methods for delivering DNA-cationic lipid complexes to mammals.

[0700] In certain embodiments, cells are engineered, ex vivo or in vivo, using a retroviral particle containing RNA which comprises a sequence encoding an albumin fusion protein of the present invention. Retroviruses from which the retroviral plasmid vectors may be derived include, but are not limited to, Moloney Murine Leukemia Virus, spleen necrosis virus, Rous sarcoma Virus, Harvey Sarcoma Virus, avian leukosis virus, gibbon ape leukemia virus, human immunodeficiency virus, Myeloproliferative Sarcoma Virus, and mammary tumor virus.

[0701] The retroviral plasmid vector is employed to transduce packaging cell lines to form producer cell lines. Examples of packaging cells which may be transfected include, but are not limited to, the PE501, PA317, R-2, R-AM, PA12, T19-14X, VT-19-17-H2, RCRE, RCRIP, GP+E-86, GP+envAm12, and DAN cell lines as described in Miller, Human Gene Therapy 1:5-14 (1990), which is incorporated herein by reference in its entirety. The vector may transduce the packaging cells through any means known in the art. Such means include, but are not limited to, electroporation, the use of liposomes, and CaPO₄ precipitation. In one alternative, the retroviral plasmid vector may be encapsulated into a liposome, or coupled to a lipid, and then administered to a host.

[0702] The producer cell line generates infectious retroviral vector particles which include polynucleotide encoding an albumin fusion protein of the present invention. Such retroviral vector particles then may be employed, to transduce eukaryotic cells, either in vitro or in vivo. The transduced eukaryotic cells will express a fusion protein of the present invention.

[0703] In certain other embodiments, cells are engineered, ex vivo or in vivo, with polynucleotide contained in an adenovirus vector. Adenovirus can be manipulated such that it encodes and expresses fusion protein of the present invention, and at the same time is inactivated in terms of its ability to replicate in a normal lytic viral life cycle. Adenovirus expression is achieved without integration of the viral DNA into the host cell chromosome, thereby alleviating concerns about insertional mutagenesis. Furthermore, adenoviruses have been used as live enteric vaccines for many years with an excellent safety profile (Schwartz et al. Am. Rev. Respir. Dis. 109:233-238 (1974)). Finally, adenovirus mediated gene transfer has been demonstrated in a number of instances including transfer of alpha-1-antitrypsin and CFTR to the lungs of cotton rats (Rosenfeld, M. A. et al. (1991) Science 252:431-434; Rosenfeld et al., (1992) Cell 68:143-155). Furthermore, extensive studies to attempt to establish adenovirus as a causative agent in human cancer were uniformly negative (Green, M. et al. (1979) Proc. Natl. Acad. Sci. USA 76:6606).

[0704] Suitable adenoviral vectors useful in the present invention are described, for example, in Kozarsky and Wilson, Curr. Opin. Genet. Devel. 3:499-503 (1993); Rosenfeld et al., Cell 68:143-155 (1992); Engelhardt et al., Human Genet. Ther. 4:759-769 (1993); Yang et al., Nature Genet. 7:362-369 (1994); Wilson et al., Nature 365:691-692 (1993); and U.S. Pat. No. 5,652,224, which are herein incorporated by reference. For example, the adenovirus vector Ad2 is useful and can be grown in human 293 cells. These cells contain the E1 region of adenovirus and constitutively express E1a and E1b, which complement the defective adenoviruses by providing the products of the genes deleted from the vector. In addition to Ad2, other varieties of adenovirus (e.g., Ad3, Ad5, and Ad7) are also useful in the present invention.

[0705] Preferably, the adenoviruses used in the present invention are replication deficient. Replication deficient adenoviruses require the aid of a helper virus and/or packaging cell line to form infectious particles. The resulting virus is capable of infecting cells and can express a polynucleotide of interest which is operably linked to a promoter, but cannot replicate in most cells. Replication deficient adenoviruses may be deleted in one or more of all or a portion of the following genes: E1a, E1b, E3, E4, E2a, or L1 through L5.

[0706] In certain other embodiments, the cells are engineered, ex vivo or in vivo, using an adeno-associated virus (AAV). AAVs are naturally occurring defective viruses that require helper viruses to produce infectious particles (Muzyczka, N., Curr. Topics in Microbiol. Immunol. 158:97 (1992)). It is also one of the few viruses that may integrate its DNA into non-dividing cells. Vectors containing as little as 300 base pairs of AAV can be packaged and can integrate, but space for exogenous DNA is limited to about 4.5 kb. Methods for producing and using such AAVs are known in the art. See, for example, U.S. Pat. Nos. 5,139,941, 5,173,414, 5,354,678, 5,436,146, 5,474,935, 5,478,745, and 5,589,377.

[0707] For example, an appropriate AAV vector for use in the present invention will include all the sequences necessary for DNA replication, encapsidation, and host-cell integration. The polynucleotide construct is inserted into the AAV vector using standard cloning methods, such as those found in Sambrook et al., Molecular Cloning: A Laboratory Manual, Cold Spring Harbor Press (1989). The recombinant AAV vector is then transfected into packaging cells which are infected with a helper virus, using any standard technique, including lipofection, electroporation, calcium phosphate precipitation, etc. Appropriate helper viruses include adenoviruses, cytomegaloviruses, vaccinia viruses, or herpes viruses. Once the packaging cells are transfected and infected, they will produce infectious AAV viral particles which contain the polynucleotide construct. These viral particles are then used to transduce eukaryotic cells, either ex vivo or in vivo. The transduced cells will contain the polynucleotide construct integrated into its genome, and will express a fusion protein of the invention.

[0708] Another method of gene therapy involves operably associating heterologous control regions and endogenous polynucleotide sequences (e.g. encoding a polypeptide of the present invention) via homologous recombination (see, e.g., U.S. Pat. No. 5,641,670, issued Jun. 24, 1997; International Publication No. WO 96/29411, published Sep. 26, 1996; International Publication No. WO 94/12650, published Aug. 4, 1994; Koller et al., Proc. Natl. Acad. Sci. USA 86:8932-8935 (1989); and Zijlstra et al., Nature 342:435-438 (1989), which are herein incorporated by reference. This method involves the activation of a gene which is present in the target cells, but which is not normally expressed in the cells, or is expressed at a lower level than desired.

[0709] Polynucleotide constructs are made, using standard techniques known in the art, which contain the promoter with targeting sequences flanking the promoter. Suitable promoters are described herein. The targeting sequence is sufficiently complementary to an endogenous sequence to permit homologous recombination of the promoter-targeting sequence with the endogenous sequence. The targeting sequence will be sufficiently near the 5′ end of the desired endogenous polynucleotide sequence so the promoter will be operably linked to the endogenous sequence upon homologous recombination.

[0710] The promoter and the targeting sequences can be amplified using PCR. Preferably, the amplified promoter contains distinct restriction enzyme sites on the 5′ and 3′ ends. Preferably, the 3′ end of the first targeting sequence contains the same restriction enzyme site as the 5′ end of the amplified promoter and the 5′ end of the second targeting sequence contains the same restriction site as the 3′ end of the amplified promoter. The amplified promoter and targeting sequences are digested and ligated together.

[0711] The promoter-targeting sequence construct is delivered to the cells, either as naked polynucleotide, or in conjunction with transfection-facilitating agents, such as liposomes, viral sequences, viral particles, whole viruses, lipofection, precipitating agents, etc., described in more detail above. The P promoter-targeting sequence can be delivered by any method, included direct needle injection, intravenous injection, topical administration, catheter infusion, particle accelerators, etc. The methods are described in more detail below.

[0712] The promoter-targeting sequence construct is taken up by cells. Homologous recombination between the construct and the endogenous sequence takes place, such that an endogenous sequence is placed under the control of the promoter. The promoter then drives the expression of the endogenous sequence.

[0713] The polynucleotide encoding an albumin fusion protein of the present invention may contain a secretory signal sequence that facilitates secretion of the protein. Typically, the signal sequence is positioned in the coding region of the polynucleotide to be expressed towards or at the 5′ end of the coding region. The signal sequence may be homologous or heterologous to the polynucleotide of interest and may be homologous or heterologous to the cells to be transfected. Additionally, the signal sequence may be chemically synthesized using methods known in the art.

[0714] Any mode of administration of any of the above-described polynucleotides constructs can be used so long as the mode results in the expression of one or more molecules in an amount sufficient to provide a therapeutic effect. This includes direct needle injection, systemic injection, catheter infusion, biolistic injectors, particle accelerators (i.e., “gene guns”), gelfoam sponge depots, other commercially available depot materials, osmotic pumps (e.g., Alza minipumps), oral or suppositorial solid (tablet or pill) pharmaceutical formulations, and decanting or topical applications during surgery. For example, direct injection of naked calcium phosphate-precipitated plasmid into rat liver and rat spleen or a protein-coated plasmid into the portal vein has resulted in gene expression of the foreign gene in the rat livers (Kaneda et al., Science 243:375 (1989)).

[0715] A preferred method of local administration is by direct injection. Preferably, an albumin fusion protein of the present invention complexed with a delivery vehicle is administered by direct injection into or locally within the area of arteries. Administration of a composition locally within the area of arteries refers to injecting the composition centimeters and preferably, millimeters within arteries.

[0716] Another method of local administration is to contact a polynucleotide construct of the present invention in or around a surgical wound. For example, a patient can undergo surgery and the polynucleotide construct can be coated on the surface of tissue inside the wound or the construct can be injected into areas of tissue inside the wound.

[0717] Therapeutic compositions useful in systemic administration, include fusion proteins of the present invention complexed to a targeted delivery vehicle of the present invention. Suitable delivery vehicles for use with systemic administration comprise liposomes comprising ligands for targeting the vehicle to a particular site. In specific embodiments, suitable delivery vehicles for use with systemic administration comprise liposomes comprising albumin fusion proteins of the invention for targeting the vehicle to a particular site.

[0718] Preferred methods of systemic administration, include intravenous injection, aerosol, oral and percutaneous (topical) delivery. Intravenous injections can be performed using methods standard in the art. Aerosol delivery can also be performed using methods standard in the art (see, for example, Stribling et al., Proc. Natl. Acad. Sci. USA 189:11277-11281, 1992, which is incorporated herein by reference). Oral delivery can be performed by complexing a polynucleotide construct of the present invention to a carrier capable of withstanding degradation by digestive enzymes in the gut of an animal. Examples of such carriers, include plastic capsules or tablets, such as those known in the art. Topical delivery can be performed by mixing a polynucleotide construct of the present invention with a lipophilic reagent (e.g., DMSO) that is capable of passing into the skin.

[0719] Determining an effective amount of substance to be delivered can depend upon a number of factors including, for example, the chemical structure and biological activity of the substance, the age and weight of the animal, the precise condition requiring treatment and its severity, and the route of administration. The frequency of treatments depends upon a number of factors, such as the amount of polynucleotide constructs administered per dose, as well as the health and history of the subject. The precise amount, number of doses, and timing of doses will be determined by the attending physician or veterinarian.

[0720] Albumin fusion proteins of the present invention can be administered to any animal, preferably to mammals and birds. Preferred mammals include humans, dogs, cats, mice, rats, rabbits sheep, cattle, horses and pigs, with humans being particularly preferred.

[0721] Biological Activities

[0722] Albumin fusion proteins and/or polynucleotides encoding albumin fusion proteins of the present invention, can be used in assays to test for one or more biological activities. If an albumin fusion protein and/or polynucleotide exhibits an activity in a particular assay, it is likely that the Therapeutic protein corresponding to the fusion protein may be involved in the diseases associated with the biological activity. Thus, the fusion protein could be used to treat the associated disease.

[0723] In preferred embodiments, the present invention encompasses a method of treating a disease or disorder listed in the “Preferred Indication Y” column of Table 1 comprising administering to a patient in which such treatment, prevention or amelioration is desired an albumin fusion protein of the invention that comprises a Therapeutic protein portion corresponding to a Therapeutic protein disclosed in the “Therapeutic Protein X” column of Table 1 (in the same row as the disease or disorder to be treated is listed in the “Preferred Indication Y” column of Table 1) in an amount effective to treat, prevent or ameliorate the disease or disorder.

[0724] In a further preferred embodiment, the present invention encompasses a method of treating a disease or disorder listed for a particular Therapeutic protein in the “Preferred Indication:Y” column of Table 1 comprising administering to a patient in which such treatment, prevention or amelioration is desired an albumin fusion protein of the invention that comprises a Therapeutic protein portion corresponding to the Therapeutic protein for which the indications in the Examples are related in an amount effective to treat, prevent or ameliorate the disease or disorder.

[0725] Specifically contemplated by the present invention are albumin fusion proteins produced by a cell when encoded by the polynucleotides that encode SEQ ID NO:Y. When these polynucleotides are used to express the encoded protein from a cell, the cell's natural secretion and processing steps produces a protein that lacks the signal sequence explicitly listed in columns 4 and/or 11 of Table 2. The specific amino acid sequence of the listed signal sequence is shown in the specification or is well known in the art. Thus, most preferred embodiments of the present invention include the albumin fusion protein produced by a cell (which would lack the leader sequence shown in columns 4 and/or 11 of Table 2). Also most preferred are polypeptides comprising SEQ ID NO:Y without the specific leader sequence listed in columns 4 and/or 11 of Table 2. Compositions comprising these two preferred embodiments, including pharmaceutical compositions, are also preferred. These albumin fusion proteins are specifically contemplated to treat, prevent, or ameliorate a disease or disorder listed for a particular Therapeutic protein in the “Preferred Indication:Y” column of Table 1.

[0726] In preferred embodiments, fusion proteins of the present invention may be used in the diagnosis, prognosis, prevention and/or treatment of diseases and/or disorders relating to diseases and disorders of the endocrine system (see, for example, “Endocrine Disorders” section below), the nervous system (see, for example, “Neurological Disorders” section below), the immune system (see, for example, “Immune Activity” section below), respiratory system (see, for example, “Respiratory Disorders” section below), cardiovascular system (see, for example, “Cardiovascular Disorders” section below), reproductive system (see, for example, “Reproductive System Disorders” section below) digestive system (see, for example, “Gastrointestinal Disorders” section below), diseases and/or disorders relating to cell proliferation (see, for example, “Hyperproliferative Disorders” section below), and/or diseases or disorders relating to the blood (see, for example, “Blood-Related Disorders” section below).

[0727] In certain embodiments, an albumin fusion protein of the present invention may be used to diagnose and/or prognose diseases and/or disorders associated with the tissue(s) in which the gene corresponding to the Therapeutic protein portion of the fusion protein of the invention is expressed.

[0728] Thus, fusion proteins of the invention and polynucleotides encoding albumin fusion proteins of the invention are useful in the diagnosis, detection and/or treatment of diseases and/or disorders associated with activities that include, but are not limited to, prohormone activation, neurotransmitter activity, cellular signaling, cellular proliferation, cellular differentiation, and cell migration.

[0729] More generally, fusion proteins of the invention and polynucleotides encoding albumin fusion proteins of the invention may be useful for the diagnosis, prognosis, prevention and/or treatment of diseases and/or disorders associated with the following systems.

[0730] Immune Activity

[0731] Albumin fusion proteins of the invention and polynucleotides encoding albumin fusion proteins of the invention may be useful in treating, preventing, diagnosing and/or prognosing diseases, disorders, and/or conditions of the immune system, by, for example, activating or inhibiting the proliferation, differentiation, or mobilization (chemotaxis) of immune cells. Immune cells develop through a process called hematopoiesis, producing myeloid (platelets, red blood cells, neutrophils, and macrophages) and lymphoid (B and T lymphocytes) cells from pluripotent stem cells. The etiology of these immune diseases, disorders, and/or conditions may be genetic, somatic, such as cancer and some autoimmune diseases, acquired (e.g., by chemotherapy or toxins), or infectious. Moreover, fusion proteins of the invention and/or polynucleotides encoding albumin fusion proteins of the invention can be used as a marker or detector of a particular immune system disease or disorder.

[0732] In another embodiment, a fusion protein of the invention and/or polynucleotide encoding an albumin fusion protein of the invention, may be used to treat diseases and disorders of the immune system and/or to inhibit or enhance an immune response generated by cells associated with the tissue(s) in which the polypeptide of the invention is expressed.

[0733] Albumin fusion proteins of the invention and/or polynucleotides encoding albumin fusion proteins of the invention may be useful in treating, preventing, diagnosing, and/or prognosing immunodeficiencies, including both congenital and acquired immunodeficiencies. Examples of B cell immunodeficiencies in which immunoglobulin levels B cell function and/or B cell numbers are decreased include: X-linked agammaglobulinemia (Bruton's disease), X-linked infantile agammaglobulinemia, X-linked immunodeficiency with hyper IgM, non X-linked immunodeficiency with hyper IgM, X-linked lymphoproliferative syndrome (XLP), agammaglobulinemia including congenital and acquired agammaglobulinemia, adult onset agammaglobulinemia, late-onset agammaglobulinemia, dysgammaglobulinemia, hypogammaglobulinemia, unspecified hypogammaglobulinemia, recessive agammaglobulinemia (Swiss type), Selective IgM deficiency, selective IgA deficiency, selective IgG subclass deficiencies, IgG subclass deficiency (with or without IgA deficiency), Ig deficiency with increased IgM, IgG and IgA deficiency with increased IgM, antibody deficiency with normal or elevated Igs, Ig heavy chain deletions, kappa chain deficiency, B cell lymphoproliferative disorder (BLPD), common variable immunodeficiency (CVID), common variable immunodeficiency (CVI) (acquired), and transient hypogammaglobulinemia of infancy.

[0734] In specific embodiments, ataxia-telangiectasia or conditions associated with ataxia-telangiectasia are treated, prevented, diagnosed, and/or prognosing using the, fusion proteins of the invention and/or polynucleotides encoding albumin fusion proteins of the invention.

[0735] Examples of congenital immunodeficiencies in which T cell and/or B cell function and/or number is decreased include, but are not limited to: DiGeorge anomaly, severe combined immunodeficiencies (SCID) (including, but not limited to, X-linked SCID, autosomal recessive SCID, adenosine deaminase deficiency, purine nucleoside phosphorylase (PNP) deficiency, Class II MHC deficiency (Bare lymphocyte syndrome), Wiskott-Aldrich syndrome, and ataxia telangiectasia), thymic hypoplasia, third and fourth pharyngeal pouch syndrome, 22q11.2 deletion, chronic mucocutaneous candidiasis, natural killer cell deficiency (NK), idiopathic CD4+ T-lymphocytopenia, immunodeficiency with predominant T cell defect (unspecified), and unspecified immunodeficiency of cell mediated immunity.

[0736] In specific embodiments, DiGeorge anomaly or conditions associated with DiGeorge anomaly are treated, prevented, diagnosed, and/or prognosed using fusion proteins of the invention and/or polynucleotides encoding albumin fusion proteins of the invention.

[0737] Other immunodeficiencies that may be treated, prevented, diagnosed, and/or prognosed using fusion proteins of the invention and/or polynucleotides encoding albumin fusion proteins of the invention, include, but are not limited to, chronic granulomatous disease, Chédiak-Higashi syndrome, myeloperoxidase deficiency, leukocyte glucose-6-phosphate dehydrogenase deficiency, X-linked lymphoproliferative syndrome (XLP), leukocyte adhesion deficiency, complement component deficiencies (including C1, C2, C3, C4, C5, C6, C7, C8 and/or C9 deficiencies), reticular dysgenesis, thymic alymphoplasia-aplasia, immunodeficiency with thymoma, severe congenital leukopenia, dysplasia with immunodeficiency, neonatal neutropenia, short limbed dwarfism, and Nezelof syndrome-combined immunodeficiency with Igs.

[0738] In a preferred embodiment, the immunodeficiencies and/or conditions associated with the immunodeficiencies recited above are treated, prevented, diagnosed and/or prognosed using fusion proteins of the invention and/or polynucleotides encoding albumin fusion proteins of the invention.

[0739] In a preferred embodiment fusion proteins of the invention and/or polynucleotides encoding albumin fusion proteins of the invention could be used as an agent to boost immunoresponsiveness among immunodeficient individuals. In specific embodiments, fusion proteins of the invention and/or polynucleotides encoding albumin fusion proteins of the invention could be used as an agent to boost immunoresponsiveness among B cell and/or T cell immunodeficient individuals.

[0740] The albumin fusion proteins of the invention and/or polynucleotides encoding albumin fusion proteins of the invention may be useful in treating, preventing, diagnosing and/or prognosing autoimmune disorders. Many autoimmune disorders result from inappropriate recognition of self as foreign material by immune cells. This inappropriate recognition results in an immune response leading to the destruction of the host tissue. Therefore, the administration of fusion proteins of the invention and/or polynucleotides encoding albumin fusion proteins of the invention that can inhibit an immune response, particularly the proliferation, differentiation, or chemotaxis of T-cells, may be an effective therapy in preventing autoimmune disorders.

[0741] Autoimmune diseases or disorders that may be treated, prevented, diagnosed and/or prognosed by fusion proteins of the invention and/or polynucleotides encoding albumin fusion proteins of the invention include, but are not limited to, one or more of the following: systemic lupus erythematosus, rheumatoid arthritis, ankylosing spondylitis, multiple sclerosis, autoimmune thyroiditis, Hashimoto's thyroiditis, autoimmune hemolytic anemia, hemolytic anemia, thrombocytopenia, autoimmune thrombocytopenia purpura, autoimmune neonatal thrombocytopenia, idiopathic thrombocytopenia purpura, purpura (e.g., Henloch-Scoenlein purpura), autoimmunocytopenia, Goodpasture's syndrome, Pemphigus vulgaris, myasthenia gravis, Grave's disease (hyperthyroidism), and insulin-resistant diabetes mellitus.

[0742] Additional disorders that are likely to have an autoimmune component that may be treated, prevented, and/or diagnosed with the albumin fusion proteins of the invention and/or polynucleotides encoding albumin fusion proteins of the invention include, but are not limited to, type II collagen-induced arthritis, antiphospholipid syndrome, dermatitis, allergic encephalomyelitis, myocarditis, relapsing polychondritis, rheumatic heart disease, neuritis, uveitis ophthalmia, polyendocrinopathies, Reiter's Disease, Stiff-Man Syndrome, autoimmune pulmonary inflammation, autism, Guillain-Barre Syndrome, insulin dependent diabetes mellitus, and autoimmune inflammatory eye disorders.

[0743] Additional disorders that are likely to have an autoimmune component that may be treated, prevented, diagnosed and/or prognosed with the albumin fusion proteins of the invention and/or polynucleotides encoding albumin fusion proteins of the invention include, but are not limited to, scleroderma with anti-collagen antibodies (often characterized, e.g., by nucleolar and other nuclear antibodies), mixed connective tissue disease (often characterized, e.g., by antibodies to extractable nuclear antigens (e.g., ribonucleoprotein)), polymyositis (often characterized, e.g., by nonhistone ANA), pernicious anemia (often characterized, e.g., by antiparietal cell, microsomes, and intrinsic factor antibodies), idiopathic Addison's disease (often characterized, e.g., by humoral and cell-mediated adrenal cytotoxicity, infertility (often characterized, e.g., by antispermatozoal antibodies), glomerulonephritis (often characterized, e.g., by glomerular basement membrane antibodies or immune complexes), bullous pemphigoid (often characterized, e.g., by IgG and complement in basement membrane), Sjogren's syndrome (often characterized, e.g., by multiple tissue antibodies, and/or a specific nonhistone ANA (SS-B)), diabetes mellitus (often characterized, e.g., by cell-mediated and humoral islet cell antibodies), and adrenergic drug resistance (including adrenergic drug resistance with asthma or cystic fibrosis) (often characterized, e.g., by beta-adrenergic receptor antibodies).

[0744] Additional disorders that may have an autoimmune component that may be treated, prevented, diagnosed and/or prognosed with the albumin fusion proteins of the invention and/or polynucleotides encoding albumin fusion proteins of the invention include, but are not limited to, chronic active hepatitis (often characterized, e.g., by smooth muscle antibodies), primary biliary cirrhosis (often characterized, e.g., by mitochondria antibodies), other endocrine gland failure (often characterized, e.g., by specific tissue antibodies in some cases), vitiligo (often characterized, e.g., by melanocyte antibodies), vasculitis (often characterized, e.g., by Ig and complement in vessel walls and/or low serum complement), post-MI (often characterized, e.g., by myocardial antibodies), cardiotomy syndrome (often characterized, e.g., by myocardial antibodies), urticaria (often characterized, e.g., by IgG and IgM antibodies to IgE), atopic dermatitis (often characterized, e.g., by IgG and IgM antibodies to IgE), asthma (often characterized, e.g., by IgG and IgM antibodies to IgE), and many other inflammatory, granulomatous, degenerative, and atrophic disorders.

[0745] In a preferred embodiment, the autoimmune diseases and disorders and/or conditions associated with the diseases and disorders recited above are treated, prevented, diagnosed and/or prognosed using for example, fusion proteins of the invention and/or polynucleotides encoding albumin fusion proteins of the invention. In a specific preferred embodiment, rheumatoid arthritis is treated, prevented, and/or diagnosed using fusion proteins of the invention and/or polynucleotides encoding albumin fusion proteins of the invention.

[0746] In another specific preferred embodiment, systemic lupus erythematosus is treated, prevented, and/or diagnosed using fusion proteins of the invention and/or polynucleotides encoding albumin fusion proteins of the invention. In another specific preferred embodiment, idiopathic thrombocytopenia purpura is treated, prevented, and/or diagnosed using fusion proteins of the invention and/or polynucleotides encoding albumin fusion proteins of the invention.

[0747] In another specific preferred embodiment IgA nephropathy is treated, prevented, and/or diagnosed using fusion proteins of the invention and/or polynucleotides encoding albumin fusion proteins of the invention.

[0748] In a preferred embodiment, the autoimmune diseases and disorders and/or conditions associated with the diseases and disorders recited above are treated, prevented, diagnosed and/or prognosed using fusion proteins of the invention and/or polynucleotides encoding albumin fusion proteins of the invention.

[0749] In preferred embodiments, fusion proteins of the invention and/or polynucleotides encoding albumin fusion proteins of the invention are used as a immunosuppressive agent(s).

[0750] Albumin fusion proteins of the invention and/or polynucleotides encoding albumin fusion proteins of the invention may be useful in treating, preventing, prognosing, and/or diagnosing diseases, disorders, and/or conditions of hematopoietic cells. Albumin fusion proteins of the invention and/or polynucleotides encoding albumin fusion proteins of the invention could be used to increase differentiation and proliferation of hematopoietic cells, including the pluripotent stem cells, in an effort to treat or prevent those diseases, disorders, and/or conditions associated with a decrease in certain (or many) types hematopoietic cells, including but not limited to, leukopenia, neutropenia, anemia, and thrombocytopenia. Alternatively, fusion proteins of the invention and/or polynucleotides encoding albumin fusion proteins of the invention could be used to increase differentiation and proliferation of hematopoietic cells, including the pluripotent stem cells, in an effort to treat or prevent those diseases, disorders, and/or conditions associated with an increase in certain (or many) types of hematopoietic cells, including but not limited to, histiocytosis.

[0751] Allergic reactions and conditions, such as asthma (particularly allergic asthma) or other respiratory problems, may also be treated, prevented, diagnosed and/or prognosed using fusion proteins of the invention and/or polynucleotides encoding albumin fusion proteins of the invention. Moreover, these molecules can be used to treat, prevent, prognose, and/or diagnose anaphylaxis, hypersensitivity to an antigenic molecule, or blood group incompatibility.

[0752] Additionally, fusion proteins of the invention and/or polynucleotides encoding albumin fusion proteins of the invention, may be used to treat, prevent, diagnose and/or prognose IgE-mediated allergic reactions. Such allergic reactions include, but are not limited to, asthma, rhinitis, and eczema. In specific embodiments, fusion proteins of the invention and/or polynucleotides encoding albumin fusion proteins of the invention may be used to modulate IgE concentrations in vitro or in vivo.

[0753] Moreover, fusion proteins of the invention and/or polynucleotides encoding albumin fusion proteins of the invention have uses in the diagnosis, prognosis, prevention, and/or treatment of inflammatory conditions. For example, since fusion proteins of the invention and/or polynucleotides encoding albumin fusion proteins of the invention may inhibit the activation, proliferation and/or differentiation of cells involved in an inflammatory response, these molecules can be used to prevent and/or treat chronic and acute inflammatory conditions. Such inflammatory conditions include, but are not limited to, for example, inflammation associated with infection (e.g., septic shock, sepsis, or systemic inflammatory response syndrome), ischemia-reperfusion injury, endotoxin lethality, complement-mediated hyperacute rejection, nephritis, cytokine or chemokine induced lung injury, inflammatory bowel disease, Crohn's disease, over production of cytokines (e.g., TNF or IL-1.), respiratory disorders (e.g., asthma and allergy); gastrointestinal disorders (e.g., inflammatory bowel disease); cancers (e.g., gastric, ovarian, lung, bladder, liver, and breast); CNS disorders (e.g., multiple sclerosis; ischemic brain injury and/or stroke, traumatic brain injury, neurodegenerative disorders (e.g., Parkinson's disease and Alzheimer's disease); AIDS-related dementia; and prion disease); cardiovascular disorders (e.g., atherosclerosis, myocarditis, cardiovascular disease, and cardiopulmonary bypass complications); as well as many additional diseases, conditions, and disorders that are characterized by inflammation (e.g., hepatitis, rheumatoid arthritis, gout, trauma, pancreatitis, sarcoidosis, dermatitis, renal ischemia-reperfusion injury, Grave's disease, systemic lupus erythematosus, diabetes mellitus, and allogenic transplant rejection).

[0754] Because inflammation is a fundamental defense mechanism, inflammatory disorders can effect virtually any tissue of the body. Accordingly, fusion proteins of the invention and/or polynucleotides encoding albumin fusion proteins of the invention, have uses in the treatment of tissue-specific inflammatory disorders, including, but not limited to, adrenalitis, alveolitis, angiocholecystitis, appendicitis, balanitis, blepharitis, bronchitis, bursitis, carditis, cellulitis, cervicitis, cholecystitis, chorditis, cochlitis, colitis, conjunctivitis, cystitis, dermatitis, diverticulitis, encephalitis, endocarditis, esophagitis, eustachitis, fibrositis, folliculitis, gastritis, gastroenteritis, gingivitis, glossitis, hepatosplenitis, keratitis, labyrinthitis, laryngitis, lymphangitis, mastitis, media otitis, meningitis, metritis, mucitis, myocarditis, myosititis, myringitis, nephritis, neuritis, orchitis, osteochondritis, otitis, pericarditis, peritendonitis, peritonitis, pharyngitis, phlebitis, poliomyelitis, prostatitis, pulpitis, retinitis, rhinitis, salpingitis, scleritis, sclerochoroiditis, scrotitis, sinusitis, spondylitis, steatitis, stomatitis, synovitis, syringitis, tendonitis, tonsillitis, urethritis, and vaginitis.

[0755] In specific embodiments, fusion proteins of the invention and/or polynucleotides encoding albumin fusion proteins of the invention, are useful to diagnose, prognose, prevent, and/or treat organ transplant rejections and graft-versus-host disease. Organ rejection occurs by host immune cell destruction of the transplanted tissue through an immune response. Similarly, an immune response is also involved in GVHD, but, in this case, the foreign transplanted immune cells destroy the host tissues. Polypeptides, antibodies, or polynucleotides of the invention, and/or agonists or antagonists thereof, that inhibit an immune response, particularly the activation, proliferation, differentiation, or chemotaxis of T-cells, may be an effective therapy in preventing organ rejection or GVHD. In specific embodiments, fusion proteins of the invention and/or polynucleotides encoding albumin fusion proteins of the invention, that inhibit an immune response, particularly the activation, proliferation, differentiation, or chemotaxis of T-cells, may be an effective therapy in preventing experimental allergic and hyperacute xenograft rejection.

[0756] In other embodiments, fusion proteins of the invention and/or polynucleotides encoding albumin fusion proteins of the invention, are useful to diagnose, prognose, prevent, and/or treat immune complex diseases, including, but not limited to, serum sickness, post streptococcal glomerulonephritis, polyarteritis nodosa, and immune complex-induced vasculitis.

[0757] Albumin fusion proteins of the invention and/or polynucleotides encoding albumin fusion proteins of the invention can be used to treat, detect, and/or prevent infectious agents. For example, by increasing the immune response, particularly increasing the proliferation activation and/or differentiation of B and/or T cells, infectious diseases may be treated, detected, and/or prevented. The immune response may be increased by either enhancing an existing immune response, or by initiating a new immune response. Alternatively, fusion proteins of the invention and/or polynucleotides encoding albumin fusion proteins of the invention may also directly inhibit the infectious agent (refer to section of application listing infectious agents, etc), without necessarily eliciting an immune response.

[0758] In another embodiment, albumin fusion proteins of the invention and/or polynucleotides encoding albumin fusion proteins of the invention are used as a vaccine adjuvant that enhances immune responsiveness to an antigen. In a specific embodiment, albumin fusion proteins of the invention and/or polynucleotides encoding albumin fusion proteins of the invention are used as an adjuvant to enhance tumor-specific immune responses.

[0759] In another specific embodiment, albumin fusion proteins of the invention and/or polynucleotides encoding albumin fusion proteins of the invention are used as an adjuvant to enhance anti-viral immune responses. Anti-viral immune responses that may be enhanced using the compositions of the invention as an adjuvant, include virus and virus associated diseases or symptoms described herein or otherwise known in the art. In specific embodiments, the compositions of the invention are used as an adjuvant to enhance an immune response to a virus, disease, or symptom selected from the group consisting of: AIDS, meningitis, Dengue, EBV, and hepatitis (e.g., hepatitis B). In another specific embodiment, the compositions of the invention are used as an adjuvant to enhance an immune response to a virus, disease, or symptom selected from the group consisting of: HIV/AIDS, respiratory syncytial virus, Dengue, rotavirus, Japanese B encephalitis, influenza A and B, parainfluenza, measles, cytomegalovirus, rabies, Junin, Chikungunya, Rift Valley Fever, herpes simplex, and yellow fever.

[0760] In another specific embodiment, albumin fusion proteins of the invention and/or polynucleotides encoding albumin fusion proteins of the invention are used as an adjuvant to enhance anti-bacterial or anti-fungal immune responses. Anti-bacterial or anti-fungal immune responses that may be enhanced using the compositions of the invention as an adjuvant, include bacteria or fungus and bacteria or fungus associated diseases or symptoms described herein or otherwise known in the art. In specific embodiments, the compositions of the invention are used as an adjuvant to enhance an immune response to a bacteria or fungus, disease, or symptom selected from the group consisting of: tetanus, Diphtheria, botulism, and meningitis type B.

[0761] In another specific embodiment, the compositions of the invention are used as an adjuvant to enhance an immune response to a bacteria or fungus, disease, or symptom selected from the group consisting of: Vibrio cholerae, Mycobacterium leprae, Salmonella typhi, Salmonella paratyphi, Meisseria meningitidis, Streptococcus pneumoniae, Group B streptococcus, Shigella spp., Enterotoxigenic Escherichia coli, Enterohemorrhagic E. coli, and Borrelia burgdorferi.

[0762] In another specific embodiment, albumin fusion proteins of the invention and/or polynucleotides encoding albumin fusion proteins of the invention are used as an adjuvant to enhance anti-parasitic immune responses. Anti-parasitic immune responses that may be enhanced using the compositions of the invention as an adjuvant, include parasite and parasite associated diseases or symptoms described herein or otherwise known in the art. In specific embodiments, the compositions of the invention are used as an adjuvant to enhance an immune response to a parasite. In another specific embodiment, the compositions of the invention are used as an adjuvant to enhance an immune response to Plasmodium (malaria) or Leishmania.

[0763] In another specific embodiment, albumin fusion proteins of the invention and/or polynucleotides encoding albumin fusion proteins of the invention may also be employed to treat infectious diseases including silicosis, sarcoidosis, and idiopathic pulmonary fibrosis; for example, by preventing the recruitment and activation of mononuclear phagocytes.

[0764] In another specific embodiment, albumin fusion proteins of the invention and/or polynucleotides encoding albumin fusion proteins of the invention are used as an antigen for the generation of antibodies to inhibit or enhance immune mediated responses against polypeptides of the invention.

[0765] In one embodiment, albumin fusion proteins of the invention and/or polynucleotides encoding albumin fusion proteins of the invention are administered to an animal (e.g., mouse, rat, rabbit, hamster, guinea pig, pigs, micro-pig, chicken, camel, goat, horse, cow, sheep, dog, cat, non-human primate, and human, most preferably human) to boost the immune system to produce increased quantities of one or more antibodies (e.g., IgG, IgA, IgM, and IgE), to induce higher affinity antibody production and immunoglobulin class switching (e.g., IgG, IgA, IgM, and IgE), and/or to increase an immune response.

[0766] In another specific embodiment, albumin fusion proteins of the invention and/or polynucleotides encoding albumin fusion proteins of the invention are used as a stimulator of B cell responsiveness to pathogens.

[0767] In another specific embodiment, albumin fusion proteins of the invention and/or polynucleotides encoding albumin fusion proteins of the invention are used as an activator of T cells.

[0768] In another specific embodiment, albumin fusion proteins of the invention and/or polynucleotides encoding albumin fusion proteins of the invention are used as an agent that elevates the immune status of an individual prior to their receipt of immunosuppressive therapies.

[0769] In another specific embodiment, albumin fusion proteins of the invention and/or polynucleotides encoding albumin fusion proteins of the invention are used as an agent to induce higher affinity antibodies.

[0770] In another specific embodiment, albumin fusion proteins of the invention and/or polynucleotides encoding albumin fusion proteins of the invention are used as an agent to increase serum immunoglobulin concentrations.

[0771] In another specific embodiment, albumin fusion proteins of the invention and/or polynucleotides encoding albumin fusion proteins of the invention are used as an agent to accelerate recovery of immunocompromised individuals.

[0772] In another specific embodiment, albumin fusion proteins of the invention and/or polynucleotides encoding albumin fusion proteins of the invention are used as an agent to boost immunoresponsiveness among aged populations and/or neonates.

[0773] In another specific embodiment, albumin fusion proteins of the invention and/or polynucleotides encoding albumin fusion proteins of the invention are used as an immune system enhancer prior to, during, or after bone marrow transplant and/or other transplants (e.g., allogeneic or xenogeneic organ transplantation). With respect to transplantation, compositions of the invention may be administered prior to, concomitant with, and/or after transplantation. In a specific embodiment, compositions of the invention are administered after transplantation, prior to the beginning of recovery of T-cell populations. In another specific embodiment, compositions of the invention are first administered after transplantation after the beginning of recovery of T cell populations, but prior to full recovery of B cell populations.

[0774] In another specific embodiment, albumin fusion proteins of the invention and/or polynucleotides encoding albumin fusion proteins of the invention are used as an agent to boost immunoresponsiveness among individuals having an acquired loss of B cell function. Conditions resulting in an acquired loss of B cell function that may be ameliorated or treated by administering the albumin fusion proteins of the invention and/or polynucleotides encoding albumin fusion proteins of the invention, include, but are not limited to, HIV Infection, AIDS, bone marrow transplant, and B cell chronic lymphocytic leukemia (CLL).

[0775] In another specific embodiment, albumin fusion proteins of the invention and/or polynucleotides encoding albumin fusion proteins of the invention are used as an agent to boost immunoresponsiveness among individuals having a temporary immune deficiency. Conditions resulting in a temporary immune deficiency that may be ameliorated or treated by administering the albumin fusion proteins of the invention and/or polynucleotides encoding albumin fusion proteins of the invention, include, but are not limited to, recovery from viral infections (e.g., influenza), conditions associated with malnutrition, recovery from infectious mononucleosis, or conditions associated with stress, recovery from measles, recovery from blood transfusion, and recovery from surgery.

[0776] In another specific embodiment, albumin fusion proteins of the invention and/or polynucleotides encoding albumin fusion proteins of the invention are used as a regulator of antigen presentation by monocytes, dendritic cells, and/or B-cells. In one embodiment, albumin fusion proteins of the invention and/or polynucleotides encoding albumin fusion proteins of the invention enhance antigen presentation or antagonize antigen presentation in vitro or in vivo. Moreover, in related embodiments, this enhancement or antagonism of antigen presentation may be useful as an anti-tumor treatment or to modulate the immune system.

[0777] In another specific embodiment, albumin fusion proteins of the invention and/or polynucleotides encoding albumin fusion proteins of the invention are used as an agent to direct an individual's immune system towards development of a humoral response (i.e. TH2) as opposed to a TH1 cellular response.

[0778] In another specific embodiment, albumin fusion proteins of the invention and/or polynucleotides encoding albumin fusion proteins of the invention are used as a means to induce tumor proliferation and thus make it more susceptible to anti-neoplastic agents. For example, multiple myeloma is a slowly dividing disease and is thus refractory to virtually all anti-neoplastic regimens. If these cells were forced to proliferate more rapidly their susceptibility profile would likely change.

[0779] In another specific embodiment, albumin fusion proteins of the invention and/or polynucleotides encoding albumin fusion proteins of the invention are used as a stimulator of B cell production in pathologies such as AIDS, chronic lymphocyte disorder and/or Common Variable Immunodeficiency.

[0780] In another specific embodiment, albumin fusion proteins of the invention and/or polynucleotides encoding albumin fusion proteins of the invention are used as a therapy for generation and/or regeneration of lymphoid tissues following surgery, trauma or genetic defect. In another specific embodiment, albumin fusion proteins of the invention and/or polynucleotides encoding albumin fusion proteins of the invention are used in the pretreatment of bone marrow samples prior to transplant.

[0781] In another specific embodiment, albumin fusion proteins of the invention and/or polynucleotides encoding albumin fusion proteins of the invention are used as a gene-based therapy for genetically inherited disorders resulting in immuno-incompetence/immunodeficiency such as observed among SCID patients.

[0782] In another specific embodiment, albumin fusion proteins of the invention and/or polynucleotides encoding albumin fusion proteins of the invention are used as a means of activating monocytes/macrophages to defend against parasitic diseases that effect monocytes such as Leishmania.

[0783] In another specific embodiment, albumin fusion proteins of the invention and/or polynucleotides encoding albumin fusion proteins of the invention are used as a means of regulating secreted cytokines that are elicited by polypeptides of the invention.

[0784] In another embodiment, albumin fusion proteins of the invention and/or polynucleotides encoding albumin fusion proteins of the invention are used in one or more of the applications described herein, as they may apply to veterinary medicine.

[0785] In another specific embodiment, albumin fusion proteins of the invention and/or polynucleotides encoding albumin fusion proteins of the invention are used as a means of blocking various aspects of immune responses to foreign agents or self. Examples of diseases or conditions in which blocking of certain aspects of immune responses may be desired include autoimmune disorders such as lupus, and arthritis, as well as immunoresponsiveness to skin allergies, inflammation, bowel disease, injury and diseases/disorders associated with pathogens.

[0786] In another specific embodiment, albumin fusion proteins of the invention and/or polynucleotides encoding albumin fusion proteins of the invention are used as a therapy for preventing the B cell proliferation and Ig secretion associated with autoimmune diseases such as idiopathic thrombocytopenic purpura, systemic lupus erythematosus and multiple sclerosis.

[0787] In another specific embodiment, polypeptides, antibodies, polynucleotides and/or agonists or antagonists of the present fusion proteins of the invention and/or polynucleotides encoding albumin fusion proteins of the invention are used as a inhibitor of B and/or T cell migration in endothelial cells. This activity disrupts tissue architecture or cognate responses and is useful, for example in disrupting immune responses, and blocking sepsis.

[0788] In another specific embodiment, albumin fusion proteins of the invention and/or polynucleotides encoding albumin fusion proteins of the invention are used as a therapy for chronic hypergammaglobulinemia evident in such diseases as monoclonal gammopathy of undetermined significance (MGUS), Waldenstrom's disease, related idiopathic monoclonal gammopathies, and plasmacytomas.

[0789] In another specific embodiment, albumin fusion proteins of the invention and/or polynucleotides encoding albumin fusion proteins of the invention may be employed for instance to inhibit polypeptide chemotaxis and activation of macrophages and their precursors, and of neutrophils, basophils, B lymphocytes and some T-cell subsets, e.g., activated and CD8 cytotoxic T cells and natural killer cells, in certain autoimmune and chronic inflammatory and infective diseases. Examples of autoimmune diseases are described herein and include multiple sclerosis, and insulin-dependent diabetes.

[0790] The albumin fusion proteins of the invention and/or polynucleotides encoding albumin fusion proteins of the invention may also be employed to treat idiopathic hyper-eosinophilic syndrome by, for example, preventing eosinophil production and migration.

[0791] In another specific embodiment, albumin fusion proteins of the invention and/or polynucleotides encoding albumin fusion proteins of the invention are used to enhance or inhibit complement mediated cell lysis.

[0792] In another specific embodiment, albumin fusion proteins of the invention and/or polynucleotides encoding albumin fusion proteins of the invention are used to enhance or inhibit antibody dependent cellular cytotoxicity.

[0793] In another specific embodiment, albumin fusion proteins of the invention and/or polynucleotides encoding albumin fusion proteins of the invention may also be employed for treating atherosclerosis, for example, by preventing monocyte infiltration in the artery wall.

[0794] In another specific embodiment, albumin fusion proteins of the invention and/or polynucleotides encoding albumin fusion proteins of the invention may be employed to treat adult respiratory distress syndrome (ARDS).

[0795] In another specific embodiment, albumin fusion proteins of the invention and/or polynucleotides encoding albumin fusion proteins of the invention may be useful for stimulating wound and tissue repair, stimulating angiogenesis, and/or stimulating the repair of vascular or lymphatic diseases or disorders. Additionally, fusion proteins of the invention and/or polynucleotides encoding albumin fusion proteins of the invention may be used to stimulate the regeneration of mucosal surfaces.

[0796] In a specific embodiment, albumin fusion proteins of the invention and/or polynucleotides encoding albumin fusion proteins of the invention are used to diagnose, prognose, treat, and/or prevent a disorder characterized by primary or acquired immunodeficiency, deficient serum immunoglobulin production, recurrent infections, and/or immune system dysfunction. Moreover, fusion proteins of the invention and/or polynucleotides encoding albumin fusion proteins of the invention may be used to treat or prevent infections of the joints, bones, skin, and/or parotid glands, blood-borne infections (e.g., sepsis, meningitis, septic arthritis, and/or osteomyelitis), autoimmune diseases (e.g., those disclosed herein), inflammatory disorders, and malignancies, and/or any disease or disorder or condition associated with these infections, diseases, disorders and/or malignancies) including, but not limited to, CVID, other primary immune deficiencies, HIV disease, CLL, recurrent bronchitis, sinusitis, otitis media, conjunctivitis, pneumonia, hepatitis, meningitis, herpes zoster (e.g., severe herpes zoster), and/or pneumocystis carnii. Other diseases and disorders that may be prevented, diagnosed, prognosed, and/or treated with fusion proteins of the invention and/or polynucleotides encoding albumin fusion proteins of the invention include, but are not limited to, HIV infection, HTLV-BLV infection, lymphopenia, phagocyte bactericidal dysfunction anemia, thrombocytopenia, and hemoglobinuria.

[0797] In another embodiment, albumin fusion proteins of the invention and/or polynucleotides encoding albumin fusion proteins of the invention are used to treat, and/or diagnose an individual having common variable immunodeficiency disease (“CVID”; also known as “acquired agammaglobulinemia” and “acquired hypogammaglobulinemia”) or a subset of this disease.

[0798] In a specific embodiment, albumin fusion proteins of the invention and/or polynucleotides encoding albumin fusion proteins of the invention may be used to diagnose, prognose, prevent, and/or treat cancers or neoplasms including immune cell or immune tissue-related cancers or neoplasms. Examples of cancers or neoplasms that may be prevented, diagnosed, or treated by fusion proteins of the invention and/or polynucleotides encoding albumin fusion proteins of the invention include, but are not limited to, acute myelogenous leukemia, chronic myelogenous leukemia, Hodgkin's disease, non-Hodgkin's lymphoma, acute lymphocytic anemia (ALL) Chronic lymphocyte leukemia, plasmacytomas, multiple myeloma, Burkitt's lymphoma, EBV-transformed diseases, and/or diseases and disorders described in the section entitled “Hyperproliferative Disorders” elsewhere herein.

[0799] In another specific embodiment, albumin fusion proteins of the invention and/or polynucleotides encoding albumin fusion proteins of the invention are used as a therapy for decreasing cellular proliferation of Large B-cell Lymphomas.

[0800] In another specific embodiment, albumin fusion proteins of the invention and/or polynucleotides encoding albumin fusion proteins of the invention are used as a means of decreasing the involvement of B cells and Ig associated with Chronic Myelogenous Leukemia.

[0801] In specific embodiments, the compositions of the invention are used as an agent to boost immunoresponsiveness among B cell immunodeficient individuals, such as, for example, an individual who has undergone a partial or complete splenectomy.

[0802] Blood-Related Disorders

[0803] The albumin fusion proteins of the invention and/or polynucleotides encoding albumin fusion proteins of the invention may be used to modulate hemostatic (the stopping of bleeding) or thrombolytic (clot dissolving) activity. For example, by increasing hemostatic or thrombolytic activity, fusion proteins of the invention and/or polynucleotides encoding albumin fusion proteins of the invention could be used to treat or prevent blood coagulation diseases, disorders, and/or conditions (e.g., afibrinogenemia, factor deficiencies, hemophilia), blood platelet diseases, disorders, and/or conditions (e.g., thrombocytopenia), or wounds resulting from trauma, surgery, or other causes. Alternatively, fusion proteins of the invention and/or polynucleotides encoding albumin fusion proteins of the invention that can decrease hemostatic or thrombolytic activity could be used to inhibit or dissolve clotting. These molecules could be important in the treatment or prevention of heart attacks (infarction), strokes, or scarring.

[0804] In specific embodiments, the albumin fusion proteins of the invention and/or polynucleotides encoding albumin fusion proteins of the invention may be used to prevent, diagnose, prognose, and/or treat thrombosis, arterial thrombosis, venous thrombosis, thromboembolism, pulmonary embolism, atherosclerosis, myocardial infarction, transient ischemic attack, unstable angina. In specific embodiments, the albumin fusion proteins of the invention and/or polynucleotides encoding albumin fusion proteins of the invention may be used for the prevention of occlusion of saphenous grafts, for reducing the risk of periprocedural thrombosis as might accompany angioplasty procedures, for reducing the risk of stroke in patients with atrial fibrillation including nonrheumatic atrial fibrillation, for reducing the risk of embolism associated with mechanical heart valves and or mitral valves disease. Other uses for the albumin fusion proteins of the invention and/or polynucleotides encoding albumin fusion proteins of the invention, include, but are not limited to, the prevention of occlusions in extracorporeal devices (e.g., intravascular canulas, vascular access shunts in hemodialysis patients, hemodialysis machines, and cardiopulmonary bypass machines).

[0805] In another embodiment, albumin fusion proteins of the invention and/or polynucleotides encoding albumin fusion proteins of the invention, may be used to prevent, diagnose, prognose, and/or treat diseases and disorders of the blood and/or blood forming organs associated with the tissue(s) in which the polypeptide of the invention is expressed.

[0806] The fusion proteins of the invention and/or polynucleotides encoding albumin fusion proteins of the invention may be used to modulate hematopoietic activity (the formation of blood cells). For example, the albumin fusion proteins of the invention and/or polynucleotides encoding albumin fusion proteins of the invention may be used to increase the quantity of all or subsets of blood cells, such as, for example, erythrocytes, lymphocytes (B or T cells), myeloid cells (e.g., basophils, eosinophils, neutrophils, mast cells, macrophages) and platelets. The ability to decrease the quantity of blood cells or subsets of blood cells may be useful in the prevention, detection, diagnosis and/or treatment of anemias and leukopenias described below. Alternatively, the albumin fusion proteins of the invention and/or polynucleotides encoding albumin fusion proteins of the invention may be used to decrease the quantity of all or subsets of blood cells, such as, for example, erythrocytes, lymphocytes (B or T cells), myeloid cells (e.g., basophils, eosinophils, neutrophils, mast cells, macrophages) and platelets. The ability to decrease the quantity of blood cells or subsets of blood cells may be useful in the prevention, detection, diagnosis and/or treatment of leukocytoses, such as, for example eosinophilia.

[0807] The fusion proteins of the invention and/or polynucleotides encoding albumin fusion proteins of the invention may be used to prevent, treat, or diagnose blood dyscrasia.

[0808] Anemias are conditions in which the number of red blood cells or amount of hemoglobin (the protein that carries oxygen) in them is below normal. Anemia may be caused by excessive bleeding, decreased red blood cell production, or increased red blood cell destruction (hemolysis). The albumin fusion proteins of the invention and/or polynucleotides encoding albumin fusion proteins of the invention may be useful in treating, preventing, and/or diagnosing anemias. Anemias that may be treated prevented or diagnosed by the albumin fusion proteins of the invention and/or polynucleotides encoding albumin fusion proteins of the invention include iron deficiency anemia, hypochromic anemia, microcytic anemia, chlorosis, hereditary siderob; astic anemia, idiopathic acquired sideroblastic anemia, red cell aplasia, megaloblastic anemia (e.g., pernicious anemia, (vitamin B12 deficiency) and folic acid deficiency anemia), aplastic anemia, hemolytic anemias (e.g., autoimmune helolytic anemia, microangiopathic hemolytic anemia, and paroxysmal nocturnal hemoglobinuria). The albumin fusion proteins of the invention and/or polynucleotides encoding albumin fusion proteins of the invention may be useful in treating, preventing, and/or diagnosing anemias associated with diseases including but not limited to, anemias associated with systemic lupus erythematosus, cancers, lymphomas, chronic renal disease, and enlarged spleens. The albumin fusion proteins of the invention and/or polynucleotides encoding albumin fusion proteins of the invention may be useful in treating, preventing, and/or diagnosing anemias arising from drug treatments such as anemias associated with methyldopa, dapsone, and/or sulfadrugs. Additionally, fusion proteins of the invention and/or polynucleotides encoding albumin fusion proteins of the invention may be useful in treating, preventing, and/or diagnosing anemias associated with abnormal red blood cell architecture including but not limited to, hereditary spherocytosis, hereditary elliptocytosis, glucose-6-phosphate dehydrogenase deficiency, and sickle cell anemia.

[0809] The albumin fusion proteins of the invention and/or polynucleotides encoding albumin fusion proteins of the invention may be useful in treating, preventing, and/or diagnosing hemoglobin abnormalities, (e.g., those associated with sickle cell anemia, hemoglobin C disease, hemoglobin S-C disease, and hemoglobin E disease). Additionally, the albumin fusion proteins of the invention and/or polynucleotides encoding albumin fusion proteins of the invention may be useful in diagnosing, prognosing, preventing, and/or treating thalassemias, including, but not limited to, major and minor forms of alpha-thalassemia and beta-thalassemia.

[0810] In another embodiment, the albumin fusion proteins of the invention and/or polynucleotides encoding albumin fusion proteins of the invention may be useful in diagnosing, prognosing, preventing, and/or treating bleeding disorders including, but not limited to, thrombocytopenia (e.g., idiopathic thrombocytopenic purpura, and thrombotic thrombocytopenic purpura), Von Willebrand's disease, hereditary platelet disorders (e.g., storage pool disease such as Chediak-Higashi and Hermansky-Pudlak syndromes, thromboxane A2 dysfunction, thromboasthenia, and Bernard-Soulier syndrome), hemolytic-uremic syndrome, hemophelias such as hemophelia A or Factor VII deficiency and Christmas disease or Factor IX deficiency, Hereditary hemorrhagic Telangiectsia, also known as Rendu-Osler-Weber syndrome, allergic purpura (Henoch Schonlein purpura) and disseminated intravascular coagulation.

[0811] The effect of the albumin fusion proteins of the invention and/or polynucleotides encoding albumin fusion proteins of the invention on the clotting time of blood may be monitored using any of the clotting tests known in the art including, but not limited to, whole blood partial thromboplastin time (PTT), the activated partial thromboplastin time (aPTT), the activated clotting time (ACT), the recalcified activated clotting time, or the Lee-White Clotting time.

[0812] Several diseases and a variety of drugs can cause platelet dysfunction. Thus, in a specific embodiment, the albumin fusion proteins of the invention and/or polynucleotides encoding albumin fusion proteins of the invention may be useful in diagnosing, prognosing, preventing, and/or treating acquired platelet dysfunction such as platelet dysfunction accompanying kidney failure, leukemia, multiple myeloma, cirrhosis of the liver, and systemic lupus erythematosus as well as platelet dysfunction associated with drug treatments, including treatment with aspirin, ticlopidine, nonsteroidal anti-inflammatory drugs (used for arthritis, pain, and sprains), and penicillin in high doses.

[0813] In another embodiment, the albumin fusion proteins of the invention and/or polynucleotides encoding albumin fusion proteins of the invention may be useful in diagnosing, prognosing, preventing, and/or treating diseases and disorders characterized by or associated with increased or decreased numbers of white blood cells. Leukopenia occurs when the number of white blood cells decreases below normal. Leukopenias include, but are not limited to, neutropenia and lymphocytopenia. An increase in the number of white blood cells compared to normal is known as leukocytosis. The body generates increased numbers of white blood cells during infection. Thus, leukocytosis may simply be a normal physiological parameter that reflects infection. Alternatively, leukocytosis may be an indicator of injury or other disease such as cancer. Leokocytoses, include but are not limited to, eosinophilia, and accumulations of macrophages. In specific embodiments, the albumin fusion proteins of the invention and/or polynucleotides encoding albumin fusion proteins of the invention may be useful in diagnosing, prognosing, preventing, and/or treating leukopenia. In other specific embodiments, the albumin fusion proteins of the invention and/or polynucleotides encoding albumin fusion proteins of the invention may be useful in diagnosing, prognosing, preventing, and/or treating leukocytosis.

[0814] Leukopenia may be a generalized decreased in all types of white blood cells, or may be a specific depletion of particular types of white blood cells. Thus, in specific embodiments, the albumin fusion proteins of the invention and/or polynucleotides encoding albumin fusion proteins of the invention may be useful in diagnosing, prognosing, preventing, and/or treating decreases in neutrophil numbers, known as neutropenia. Neutropenias that may be diagnosed, prognosed, prevented, and/or treated by the albumin fusion proteins of the invention and/or polynucleotides encoding albumin fusion proteins of the invention include, but are not limited to, infantile genetic agranulocytosis, familial neutropenia, cyclic neutropenia, neutropenias resulting from or associated with dietary deficiencies (e.g., vitamin B 12 deficiency or folic acid deficiency), neutropenias resulting from or associated with drug treatments (e.g., antibiotic regimens such as penicillin treatment, sulfonamide treatment, anticoagulant treatment, anticonvulsant drugs, anti-thyroid drugs, and cancer chemotherapy), and neutropenias resulting from increased neutrophil destruction that may occur in association with some bacterial or viral infections, allergic disorders, autoimmune diseases, conditions in which an individual has an enlarged spleen (e.g., Felty syndrome, malaria and sarcoidosis), and some drug treatment regimens.

[0815] The albumin fusion proteins of the invention and/or polynucleotides encoding albumin fusion proteins of the invention may be useful in diagnosing, prognosing, preventing, and/or treating lymphocytopenias (decreased numbers of B and/or T lymphocytes), including, but not limited to, lymphocytopenias resulting from or associated with stress, drug treatments (e.g., drug treatment with corticosteroids, cancer chemotherapies, and/or radiation therapies), AIDS infection and/or other diseases such as, for example, cancer, rheumatoid arthritis, systemic lupus erythematosus, chronic infections, some viral infections and/or hereditary disorders (e.g., DiGeorge syndrome, Wiskott-Aldrich Syndrome, severe combined immunodeficiency, ataxia telangiectsia).

[0816] The albumin fusion proteins of the invention and/or polynucleotides encoding albumin fusion proteins of the invention may be useful in diagnosing, prognosing, preventing, and/or treating diseases and disorders associated with macrophage numbers and/or macrophage function including, but not limited to, Gaucher's disease, Niemann-Pick disease, Letterer-Siwe disease and Hand-Schuller-Christian disease.

[0817] In another embodiment, the albumin fusion proteins of the invention and/or polynucleotides encoding albumin fusion proteins of the invention may be useful in diagnosing, prognosing, preventing, and/or treating diseases and disorders associated with eosinophil numbers and/or eosinophil function including, but not limited to, idiopathic hypereosinophilic syndrome, eosinophilia-myalgia syndrome, and Hand-Schuller-Christian disease.

[0818] In yet another embodiment, the albumin fusion proteins of the invention and/or polynucleotides encoding albumin fusion proteins of the invention may be useful in diagnosing, prognosing, preventing, and/or treating leukemias and lymphomas including, but not limited to, acute lymphocytic (lymphpblastic) leukemia (ALL), acute myeloid (myelocytic, myelogenous, myeloblastic, or myelomonocytic) leukemia, chronic lymphocytic leukemia (e.g., B cell leukemias, T cell leukemias, Sezary syndrome, and Hairy cell leukemia), chronic myelocytic (myeloid, myelogenous, or granulocytic) leukemia, Hodgkin's lymphoma, non-hodgkin's lymphoma, Burkitt's lymphoma, and mycosis fungoides.

[0819] In other embodiments, the albumin fusion proteins of the invention and/or polynucleotides encoding albumin fusion proteins of the invention may be useful in diagnosing, prognosing, preventing, and/or treating diseases and disorders of plasma cells including, but not limited to, plasma cell dyscrasias, monoclonal gammaopathies, monoclonal gammopathies of undetermined significance, multiple myeloma, macroglobulinemia, Waldenstrom's macroglobulinemia, cryoglobulinemia, and Raynaud's phenomenon.

[0820] In other embodiments, the albumin fusion proteins of the invention and/or polynucleotides encoding albumin fusion proteins of the invention may be useful in treating, preventing, and/or diagnosing myeloproliferative disorders, including but not limited to, polycythemia vera, relative polycythemia, secondary polycythemia, myelofibrosis, acute myelofibrosis, agnogenic myeloid metaplasia, thrombocythemia, (including both primary and secondary thrombocythemia) and chronic myelocytic leukemia.

[0821] In other embodiments, the albumin fusion proteins of the invention and/or polynucleotides encoding albumin fusion proteins of the invention may be useful as a treatment prior to surgery, to increase blood cell production.

[0822] In other embodiments, the albumin fusion proteins of the invention and/or polynucleotides encoding albumin fusion proteins of the invention may be useful as an agent to enhance the migration, phagocytosis, superoxide production, antibody dependent cellular cytotoxicity of neutrophils, eosionophils and macrophages.

[0823] In other embodiments, the albumin fusion proteins of the invention and/or polynucleotides encoding albumin fusion proteins of the invention may be useful as an agent to increase the number of stem cells in circulation prior to stem cells pheresis. In another specific embodiment, the albumin fusion proteins of the invention and/or polynucleotides encoding albumin fusion proteins of the invention may be useful as an agent to increase the number of stem cells in circulation prior to platelet pheresis.

[0824] In other embodiments, the albumin fusion proteins of the invention and/or polynucleotides encoding albumin fusion proteins of the invention may be useful as an agent to increase cytokine production.

[0825] In other embodiments, the albumin fusion proteins of the invention and/or polynucleotides encoding albumin fusion proteins of the invention may be useful in preventing, diagnosing, and/or treating primary hematopoietic disorders.

[0826] Hyperproliferative Disorders

[0827] In certain embodiments, fusion proteins of the invention and/or polynucleotides encoding albumin fusion proteins of the invention can be used to treat or detect hyperproliferative disorders, including neoplasms. Albumin fusion proteins of the invention and/or polynucleotides encoding albumin fusion proteins of the invention may inhibit the proliferation of the disorder through direct or indirect interactions. Alternatively, fusion proteins of the invention and/or polynucleotides encoding albumin fusion proteins of the invention may proliferate other cells which can inhibit the hyperproliferative disorder.

[0828] For example, by increasing an immune response, particularly increasing antigenic qualities of the hyperproliferative disorder or by proliferating, differentiating, or mobilizing T-cells, hyperproliferative disorders can be treated. This immune response may be increased by either enhancing an existing immune response, or by initiating a new immune response. Alternatively, decreasing an immune response may also be a method of treating hyperproliferative disorders, such as a chemotherapeutic agent.

[0829] Examples of hyperproliferative disorders that can be treated or detected by fusion proteins of the invention and/or polynucleotides encoding albumin fusion proteins of the invention include, but are not limited to neoplasms located in the: colon, abdomen, bone, breast, digestive system, liver, pancreas, peritoneum, endocrine glands (adrenal, parathyroid, pituitary, testicles, ovary, thymus, thyroid), eye, head and neck, nervous (central and peripheral), lymphatic system, pelvis, skin, soft tissue, spleen, thorax, and urogenital tract.

[0830] Similarly, other hyperproliferative disorders can also be treated or detected by fusion proteins of the invention and/or polynucleotides encoding albumin fusion proteins of the invention. Examples of such hyperproliferative disorders include, but are not limited to: Acute Childhood Lymphoblastic Leukemia, Acute Lymphoblastic Leukemia, Acute Lymphocytic Leukemia, Acute Myeloid Leukemia, Adrenocortical Carcinoma, Adult (Primary) Hepatocellular Cancer, Adult (Primary) Liver Cancer, Adult Acute Lymphocytic Leukemia, Adult Acute Myeloid Leukemia, Adult Hodgkin's Disease, Adult Hodgkin's Lymphoma, Adult Lymphocytic Leukemia, Adult Non-Hodgkin's Lymphoma, Adult Primary Liver Cancer, Adult Soft Tissue Sarcoma, AIDS-Related Lymphoma, AIDS-Related Malignancies, Anal Cancer, Astrocytoma, Bile Duct Cancer, Bladder Cancer, Bone Cancer, Brain Stem Glioma, Brain Tumors, Breast Cancer, Cancer of the Renal Pelvis and Ureter, Central Nervous System (Primary) Lymphoma, Central Nervous System Lymphoma, Cerebellar Astrocytoma, Cerebral Astrocytoma, Cervical Cancer, Childhood (Primary) Hepatocellular Cancer, Childhood (Primary) Liver Cancer, Childhood Acute Lymphoblastic Leukemia, Childhood Acute Myeloid Leukemia, Childhood Brain Stem Glioma, Childhood Cerebellar Astrocytoma, Childhood Cerebral Astrocytoma, Childhood Extracranial Germ Cell Tumors, Childhood Hodgkin's Disease, Childhood Hodgkin's Lymphoma, Childhood Hypothalamic and Visual Pathway Glioma, Childhood Lymphoblastic Leukemia, Childhood Medulloblastoma, Childhood Non-Hodgkin's Lymphoma, Childhood Pineal and Supratentorial Primitive Neuroectodermal Tumors, Childhood Primary Liver Cancer, Childhood Rhabdomyosarcoma, Childhood Soft Tissue Sarcoma, Childhood Visual Pathway and Hypothalamic Glioma, Chronic Lymphocytic Leukemia, Chronic Myelogenous Leukemia, Colon Cancer, Cutaneous T-Cell Lymphoma, Endocrine Pancreas Islet Cell Carcinoma, Endometrial Cancer, Ependymoma, Epithelial Cancer, Esophageal Cancer, Ewing's Sarcoma and Related Tumors, Exocrine Pancreatic Cancer, Extracranial Germ Cell Tumor, Extragonadal Germ Cell Tumor, Extrahepatic Bile Duct Cancer, Eye Cancer, Female Breast Cancer, Gaucher's Disease, Gallbladder Cancer, Gastric Cancer, Gastrointestinal Carcinoid Tumor, Gastrointestinal Tumors, Germ Cell Tumors, Gestational Trophoblastic Tumor, Hairy Cell Leukemia, Head and Neck Cancer, Hepatocellular Cancer, Hodgkin's Disease, Hodgkin's Lymphoma, Hypergammaglobulinemia, Hypopharyngeal Cancer, Intestinal Cancers, Intraocular Melanoma, Islet Cell Carcinoma, Islet Cell Pancreatic Cancer, Kaposi's Sarcoma, Kidney Cancer, Laryngeal Cancer, Lip and Oral Cavity Cancer, Liver Cancer, Lung Cancer, Lymphoproliferative Disorders, Macroglobulinemia, Male Breast Cancer, Malignant Mesothelioma, Malignant Thymoma, Medulloblastoma, Melanoma, Mesothelioma, Metastatic Occult Primary Squamous Neck Cancer, Metastatic Primary Squamous Neck Cancer, Metastatic Squamous Neck Cancer, Multiple Myeloma, Multiple Myeloma/Plasma Cell Neoplasm, Myelodysplastic Syndrome, Myelogenous Leukemia, Myeloid Leukemia, Myeloproliferative Disorders, Nasal Cavity and Paranasal Sinus Cancer, Nasopharyngeal Cancer, Neuroblastoma, Non-Hodgkin's Lymphoma During Pregnancy, Nonmelanoma Skin Cancer, Non-Small Cell Lung Cancer, Occult Primary Metastatic Squamous Neck Cancer, Oropharyngeal Cancer, Osteo-/Malignant Fibrous Sarcoma, Osteosarcoma/Malignant Fibrous Histiocytoma, Osteosarcoma/Malignant Fibrous Histiocytoma of Bone, Ovarian Epithelial Cancer, Ovarian Germ Cell Tumor, Ovarian Low Malignant Potential Tumor, Pancreatic Cancer, Paraproteinemias, Purpura, Parathyroid Cancer, Penile Cancer, Pheochromocytoma, Pituitary Tumor, Plasma Cell Neoplasm/Multiple Myeloma, Primary Central Nervous System Lymphoma, Primary Liver Cancer, Prostate Cancer, Rectal Cancer, Renal Cell Cancer, Renal Pelvis and Ureter Cancer, Retinoblastoma, Rhabdomyosarcoma, Salivary Gland Cancer, Sarcoidosis Sarcomas, Sezary Syndrome, Skin Cancer, Small Cell Lung Cancer, Small Intestine Cancer, Soft Tissue Sarcoma, Squamous Neck Cancer, Stomach Cancer, Supratentorial Primitive Neuroectodermal and Pineal Tumors, T-Cell Lymphoma, Testicular Cancer, Thymoma, Thyroid Cancer, Transitional Cell Cancer of the Renal Pelvis and Ureter, Transitional Renal Pelvis and Ureter Cancer, Trophoblastic Tumors, Ureter and Renal Pelvis Cell Cancer, Urethral Cancer, Uterine Cancer, Uterine Sarcoma, Vaginal Cancer, Visual Pathway and Hypothalamic Glioma, Vulvar Cancer, Waldenstrom's Macroglobulinemia, Wilms' Tumor, and any other hyperproliferative disease, besides neoplasia, located in an organ system listed above.

[0831] In another preferred embodiment, albumin fusion proteins of the invention and/or polynucleotides encoding albumin fusion proteins of the invention are used to diagnose, prognose, prevent, and/or treat premalignant conditions and to prevent progression to a neoplastic or malignant state, including but not limited to those disorders described above. Such uses are indicated in conditions known or suspected of preceding progression to neoplasia or cancer, in particular, where non-neoplastic cell growth consisting of hyperplasia, metaplasia, or most particularly, dysplasia has occurred (for review of such abnormal growth conditions, see Robbins and Angell, 1976, Basic Pathology, 2d Ed., W.B. Saunders Co., Philadelphia, pp. 68-79.)

[0832] Hyperplasia is a form of controlled cell proliferation, involving an increase in cell number in a tissue or organ, without significant alteration in structure or function. Hyperplastic disorders which can be diagnosed, prognosed, prevented, and/or treated with fusion proteins of the invention and/or polynucleotides encoding albumin fusion proteins of the invention include, but are not limited to, angiofollicular mediastinal lymph node hyperplasia, angiolymphoid hyperplasia with eosinophilia, atypical melanocytic hyperplasia, basal cell hyperplasia, benign giant lymph node hyperplasia, cementum hyperplasia, congenital adrenal hyperplasia, congenital sebaceous hyperplasia, cystic hyperplasia, cystic hyperplasia of the breast, denture hyperplasia, ductal hyperplasia, endometrial hyperplasia, fibromuscular hyperplasia, focal epithelial hyperplasia, gingival hyperplasia, inflammatory fibrous hyperplasia, inflammatory papillary hyperplasia, intravascular papillary endothelial hyperplasia, nodular hyperplasia of prostate, nodular regenerative hyperplasia, pseudoepitheliomatous hyperplasia, senile sebaceous hyperplasia, and verrucous hyperplasia.

[0833] Metaplasia is a form of controlled cell growth in which one type of adult or fully differentiated cell substitutes for another type of adult cell. Metaplastic disorders which can be diagnosed, prognosed, prevented, and/or treated with fusion proteins of the invention and/or polynucleotides encoding albumin fusion proteins of the invention include, but are not limited to, agnogenic myeloid metaplasia, apocrine metaplasia, atypical metaplasia, autoparenchymatous metaplasia, connective tissue metaplasia, epithelial metaplasia, intestinal metaplasia, metaplastic anemia, metaplastic ossification, metaplastic polyps, myeloid metaplasia, primary myeloid metaplasia, secondary myeloid metaplasia, squamous metaplasia, squamous metaplasia of amnion, and symptomatic myeloid metaplasia.

[0834] Dysplasia is frequently a forerunner of cancer, and is found mainly in the epithelia; it is the most disorderly form of non-neoplastic cell growth, involving a loss in individual cell uniformity and in the architectural orientation of cells. Dysplastic cells often have abnormally large, deeply stained nuclei, and exhibit pleomorphism. Dysplasia characteristically occurs where there exists chronic irritation or inflammation. Dysplastic disorders which can be diagnosed, prognosed, prevented, and/or treated with fusion proteins of the invention and/or polynucleotides encoding albumin fusion proteins of the invention include, but are not limited to, anhidrotic ectodermal dysplasia, anterofacial dysplasia, asphyxiating thoracic dysplasia, atriodigital dysplasia, bronchopulmonary dysplasia, cerebral dysplasia, cervical dysplasia, chondroectodermal dysplasia, cleidocranial dysplasia, congenital ectodermal dysplasia, craniodiaphysial dysplasia, craniocarpotarsal dysplasia, craniometaphysial dysplasia, dentin dysplasia, diaphysial dysplasia, ectodermal dysplasia, enamel dysplasia, encephalo-ophthalmic dysplasia, dysplasia epiphysialis hemimelia, dysplasia epiphysialis multiplex, dysplasia epiphysialis punctata, epithelial dysplasia, faciodigitogenital dysplasia, familial fibrous dysplasia of jaws, familial white folded dysplasia, fibromuscular dysplasia, fibrous dysplasia of bone, florid osseous dysplasia, hereditary renal-retinal dysplasia, hidrotic ectodermal dysplasia, hypohidrotic ectodermal dysplasia, lymphopenic thymic dysplasia, mammary dysplasia, mandibulofacial dysplasia, metaphysial dysplasia, Mondini dysplasia, monostotic fibrous dysplasia, mucoepithelial dysplasia, multiple epiphysial dysplasia, oculoauriculovertebral dysplasia, oculodentodigital dysplasia, oculovertebral dysplasia, odontogenic dysplasia, opthalmomandibulomelic dysplasia, periapical cemental dysplasia, polyostotic fibrous dysplasia, pseudoachondroplastic spondyloepiphysial dysplasia, retinal dysplasia, septo-optic dysplasia, spondyloepiphysial dysplasia, and ventriculoradial dysplasia.

[0835] Additional pre-neoplastic disorders which can be diagnosed, prognosed, prevented, and/or treated with fusion proteins of the invention and/or polynucleotides encoding albumin fusion proteins of the invention include, but are not limited to, benign dysproliferative disorders (e.g., benign tumors, fibrocystic conditions, tissue hypertrophy, intestinal polyps, colon polyps, and esophageal dysplasia), leukoplakia, keratoses, Bowen's disease, Farmer's Skin, solar cheilitis, and solar keratosis.

[0836] In another embodiment, albumin fusion proteins of the invention and/or polynucleotides encoding albumin fusion proteins of the invention, may be used to diagnose and/or prognose disorders associated with the tissue(s) in which the polypeptide of the invention is expressed.

[0837] In another embodiment, albumin fusion proteins of the invention and/or polynucleotides encoding albumin fusion proteins of the invention conjugated to a toxin or a radioactive isotope, as described herein, may be used to treat cancers and neoplasms, including, but not limited to, those described herein. In a further preferred embodiment, albumin fusion proteins of the invention and/or polynucleotides encoding albumin fusion proteins of the invention conjugated to a toxin or a radioactive isotope, as described herein, may be used to treat acute myelogenous leukemia.

[0838] Additionally, fusion proteins of the invention and/or polynucleotides encoding albumin fusion proteins of the invention may affect apoptosis, and therefore, would be useful in treating a number of diseases associated with increased cell survival or the inhibition of apoptosis. For example, diseases associated with increased cell survival or the inhibition of apoptosis that could be diagnosed, prognosed, prevented, and/or treated by polynucleotides, polypeptides, and/or agonists or antagonists of the invention, include cancers (such as follicular lymphomas, carcinomas with p53 mutations, and hormone-dependent tumors, including, but not limited to colon cancer, cardiac tumors, pancreatic cancer, melanoma, retinoblastoma, glioblastoma, lung cancer, intestinal cancer, testicular cancer, stomach cancer, neuroblastoma, myxoma, myoma, lymphoma, endothelioma, osteoblastoma, osteoclastoma, osteosarcoma, chondrosarcoma, adenoma, breast cancer, prostate cancer, Kaposi's sarcoma and ovarian cancer); autoimmune disorders such as, multiple sclerosis, Sjogren's syndrome, Hashimoto's thyroiditis, biliary cirrhosis, Behcet's disease, Crohn's disease, polymyositis, systemic lupus erythematosus and immune-related glomerulonephritis and rheumatoid arthritis) and viral infections (such as herpes viruses, pox viruses and adenoviruses), inflammation, graft v. host disease, acute graft rejection, and chronic graft rejection.

[0839] In preferred embodiments, fusion proteins of the invention and/or polynucleotides encoding albumin fusion proteins of the invention are used to inhibit growth, progression, and/or metastasis of cancers, in particular those listed above.

[0840] Additional diseases or conditions associated with increased cell survival that could be diagnosed, prognosed, prevented, and/or treated by fusion proteins of the invention and/or polynucleotides encoding albumin fusion proteins of the invention, include, but are not limited to, progression, and/or metastases of malignancies and related disorders such as leukemia (including acute leukemias (e.g., acute lymphocytic leukemia, acute myelocytic leukemia (including myeloblastic, promyelocytic, myelomonocytic, monocytic, and erythroleukemia)) and chronic leukemias (e.g., chronic myelocytic (granulocytic) leukemia and chronic lymphocytic leukemia)), polycythemia vera, lymphomas (e.g., Hodgkin's disease and non-Hodgkin's disease), multiple myeloma, Waldenstrom's macroglobulinemia, heavy chain disease, and solid tumors including, but not limited to, sarcomas and carcinomas such as fibrosarcoma, myxosarcoma, liposarcoma, chondrosarcoma, osteogenic sarcoma, chordoma, angiosarcoma, endotheliosarcoma, lymphangiosarcoma, lymphangioendotheliosarcoma, synovioma, mesothelioma, Ewing's tumor, leiomyosarcoma, rhabdomyosarcoma, colon carcinoma, pancreatic cancer, breast cancer, ovarian cancer, prostate cancer, squamous cell carcinoma, basal cell carcinoma, adenocarcinoma, sweat gland carcinoma, sebaceous gland carcinoma, papillary carcinoma, papillary adenocarcinomas, cystadenocarcinoma, medullary carcinoma, bronchogenic carcinoma, renal cell carcinoma, hepatoma, bile duct carcinoma, choriocarcinoma, seminoma, embryonal carcinoma, Wilm's tumor, cervical cancer, testicular tumor, lung carcinoma, small cell lung carcinoma, bladder carcinoma, epithelial carcinoma, glioma, astrocytoma, medulloblastoma, craniopharyngioma, ependymoma, pinealoma, emangioblastoma, acoustic neuroma, oligodendroglioma, menangioma, melanoma, neuroblastoma, and retinoblastoma.

[0841] Diseases associated with increased apoptosis that could be diagnosed, prognosed, prevented, and/or treated by fusion proteins of the invention and/or polynucleotides encoding albumin fusion proteins of the invention, include AIDS; neurodegenerative disorders (such as Alzheimer's disease, Parkinson's disease, amyotrophic lateral sclerosis, retinitis pigmentosa, cerebellar degeneration and brain tumor or prior associated disease); autoimmune disorders (such as, multiple sclerosis, Sjogren's syndrome, Hashimoto's thyroiditis, biliary cirrhosis, Behcet's disease, Crohn's disease, polymyositis, systemic lupus erythematosus and immune-related glomerulonephritis and rheumatoid arthritis) myelodysplastic syndromes (such as aplastic anemia), graft v. host disease, ischemic injury (such as that caused by myocardial infarction, stroke and reperfusion injury), liver injury (e.g., hepatitis related liver injury, ischemia/reperfusion injury, cholestosis (bile duct injury) and liver cancer); toxin-induced liver disease (such as that caused by alcohol), septic shock, cachexia and anorexia.

[0842] Hyperproliferative diseases and/or disorders that could be diagnosed, prognosed, prevented, and/or treated by fusion proteins of the invention and/or polynucleotides encoding albumin fusion proteins of the invention, include, but are not limited to, neoplasms located in the liver, abdomen, bone, breast, digestive system, pancreas, peritoneum, endocrine glands (adrenal, parathyroid, pituitary, testicles, ovary, thymus, thyroid), eye, head and neck, nervous system (central and peripheral), lymphatic system, pelvis, skin, soft tissue, spleen, thorax, and urogenital tract.

[0843] Similarly, other hyperproliferative disorders can also be diagnosed, prognosed, prevented, and/or treated by fusion proteins of the invention and/or polynucleotides encoding albumin fusion proteins of the invention. Examples of such hyperproliferative disorders include, but are not limited to: hypergammaglobulinemia, lymphoproliferative disorders, paraproteinemias, purpura, sarcoidosis, Sezary Syndrome, Waldenstron's macroglobulinemia, Gaucher's Disease, histiocytosis, and any other hyperproliferative disease, besides neoplasia, located in an organ system listed above.

[0844] Another preferred embodiment utilizes polynucleotides encoding albumin fusion proteins of the invention to inhibit aberrant cellular division, by gene therapy using the present invention, and/or protein fusions or fragments thereof.

[0845] Thus, the present invention provides a method for treating cell proliferative disorders by inserting into an abnormally proliferating cell a polynucleotide encoding an albumin fusion protein of the present invention, wherein said polynucleotide represses said expression.

[0846] Another embodiment of the present invention provides a method of treating cell-proliferative disorders in individuals comprising administration of one or more active gene copies of the present invention to an abnormally proliferating cell or cells. In a preferred embodiment, polynucleotides of the present invention is a DNA construct comprising a recombinant expression vector effective in expressing a DNA sequence encoding said polynucleotides. In another preferred embodiment of the present invention, the DNA construct encoding the fusion protein of the present invention is inserted into cells to be treated utilizing a retrovirus, or more preferably an adenoviral vector (See G J. Nabel, et. al., PNAS 1999 96: 324-326, which is hereby incorporated by reference). In a most preferred embodiment, the viral vector is defective and will not transform non-proliferating cells, only proliferating cells. Moreover, in a preferred embodiment, the polynucleotides of the present invention inserted into proliferating cells either alone, or in combination with or fused to other polynucleotides, can then be modulated via an external stimulus (i.e. magnetic, specific small molecule, chemical, or drug administration, etc.), which acts upon the promoter upstream of said polynucleotides to induce expression of the encoded protein product. As such the beneficial therapeutic affect of the present invention may be expressly modulated (i.e. to increase, decrease, or inhibit expression of the present invention) based upon said external stimulus.

[0847] Polynucleotides of the present invention may be useful in repressing expression of oncogenic genes or antigens. By “repressing expression of the oncogenic genes” is intended the suppression of the transcription of the gene, the degradation of the gene transcript (pre-message RNA), the inhibition of splicing, the destruction of the messenger RNA, the prevention of the post-translational modifications of the protein, the destruction of the protein, or the inhibition of the normal function of the protein.

[0848] For local administration to abnormally proliferating cells, polynucleotides of the present invention may be administered by any method known to those of skill in the art including, but not limited to transfection, electroporation, microinjection of cells, or in vehicles such as liposomes, lipofectin, or as naked polynucleotides, or any other method described throughout the specification. The polynucleotide of the present invention may be delivered by known gene delivery systems such as, but not limited to, retroviral vectors (Gilboa, J. Virology 44:845 (1982); Hocke, Nature 320:275 (1986); Wilson, et al., Proc. Natl. Acad. Sci. U.S.A. 85:3014), vaccinia virus system (Chakrabarty et al., Mol. Cell. Biol. 5:3403 (1985) or other efficient DNA delivery systems (Yates et al., Nature 313:812 (1985)) known to those skilled in the art. These references are exemplary only and are hereby incorporated by reference. In order to specifically deliver or transfect cells which are abnormally proliferating and spare non-dividing cells, it is preferable to utilize a retrovirus, or adenoviral (as described in the art and elsewhere herein) delivery system known to those of skill in the art. Since host DNA replication is required for retroviral DNA to integrate and the retrovirus will be unable to self replicate due to the lack of the retrovirus genes needed for its life cycle. Utilizing such a retroviral delivery system for polynucleotides of the present invention will target said gene and constructs to abnormally proliferating cells and will spare the non-dividing normal cells.

[0849] The polynucleotides of the present invention may be delivered directly to cell proliferative disorder/disease sites in internal organs, body cavities and the like by use of imaging devices used to guide an injecting needle directly to the disease site. The polynucleotides of the present invention may also be administered to disease sites at the time of surgical intervention.

[0850] By “cell proliferative disease” is meant any human or animal disease or disorder, affecting any one or any combination of organs, cavities, or body parts, which is characterized by single or multiple local abnormal proliferations of cells, groups of cells, or tissues, whether benign or malignant.

[0851] Any amount of the polynucleotides of the present invention may be administered as long as it has a biologically inhibiting effect on the proliferation of the treated cells. Moreover, it is possible to administer more than one of the polynucleotide of the present invention simultaneously to the same site. By “biologically inhibiting” is meant partial or total growth inhibition as well as decreases in the rate of proliferation or growth of the cells. The biologically inhibitory dose may be determined by assessing the effects of the polynucleotides of the present invention on target malignant or abnormally proliferating cell growth in tissue culture, tumor growth in animals and cell cultures, or any other method known to one of ordinary skill in the art.

[0852] Moreover, fusion proteins of the invention and/or polynucleotides encoding albumin fusion proteins of the invention of the present invention are useful in inhibiting the angiogenesis of proliferative cells or tissues, either alone, as a protein fusion, or in combination with other polypeptides directly or indirectly, as described elsewhere herein. In a most preferred embodiment, said anti-angiogenesis effect may be achieved indirectly, for example, through the inhibition of hematopoietic, tumor-specific cells, such as tumor-associated macrophages (See Joseph I B, et al. J Natl Cancer Inst, 90(21):1648-53 (1998), which is hereby incorporated by reference).

[0853] Albumin fusion proteins of the invention and/or polynucleotides encoding albumin fusion proteins of the invention may be useful in inhibiting proliferative cells or tissues through the induction of apoptosis. These fusion proteins and/or polynucleotides may act either directly, or indirectly to induce apoptosis of proliferative cells and tissues, for example in the activation of a death-domain receptor, such as tumor necrosis factor (TNF) receptor-1, CD95 (Fas/APO-1), TNF-receptor-related apoptosis-mediated protein (TRAMP) and TNF-related apoptosis-inducing ligand (TRAIL) receptor-1 and -2 (See Schulze-Osthoff K, et.al., Eur J Biochem 254(3):439-59 (1998), which is hereby incorporated by reference). Moreover, in another preferred embodiment of the present invention, these fusion proteins and/or polynucleotides may induce apoptosis through other mechanisms, such as in the activation of other proteins which will activate apoptosis, or through stimulating the expression of these proteins, either alone or in combination with small molecule drugs or adjuvants, such as apoptonin, galectins, thioredoxins, anti-inflammatory proteins (See for example, Mutat Res 400(1-2):447-55 (1998), Med Hypotheses. 50(5):423-33 (1998), Chem Biol Interact. Apr 24; 111-112:23-34 (1998), J Mol. Med. 76(6):402-12 (1998), Int J Tissue React; 20(1):3-15 (1998), which are all hereby incorporated by reference).

[0854] Albumin fusion proteins of the invention and/or polynucleotides encoding albumin fusion proteins of the invention are useful in inhibiting the metastasis of proliferative cells or tissues. Inhibition may occur as a direct result of administering these albumin fusion proteins and/or polynucleotides, or indirectly, such as activating the expression of proteins known to inhibit metastasis, for example alpha 4 integrins, (See, e.g., Curr Top Microbiol Immunol 1998; 231:125-41, which is hereby incorporated by reference). Such therapeutic affects of the present invention may be achieved either alone, or in combination with small molecule drugs or adjuvants.

[0855] In another embodiment, the invention provides a method of delivering compositions containing the albumin fusion proteins of the invention and/or polynucleotides encoding albumin fusion proteins of the invention to targeted cells expressing the a polypeptide bound by, that binds to, or associates with an albumin fusion protein of the invention. Albumin fusion proteins of the invention may be associated with heterologous polypeptides, heterologous nucleic acids, toxins, or prodrugs via hydrophobic, hydrophilic, ionic and/or covalent interactions.

[0856] Albumin fusion proteins of the invention are useful in enhancing the immunogenicity and/or antigenicity of proliferating cells or tissues, either directly, such as would occur if the albumin fusion proteins of the invention ‘vaccinated’ the immune response to respond to proliferative antigens and immunogens, or indirectly, such as in activating the expression of proteins known to enhance the immune response (e.g. chemokines), to said antigens and immunogens.

[0857] Renal Disorders

[0858] Albumin fusion proteins of the invention and/or polynucleotides encoding albumin fusion proteins of the invention, may be used to treat, prevent, diagnose, and/or prognose disorders of the renal system. Renal disorders which can be diagnosed, prognosed, prevented, and/or treated with compositions of the invention include, but are not limited to, kidney failure, nephritis, blood vessel disorders of kidney, metabolic and congenital kidney disorders, urinary disorders of the kidney, autoimmune disorders, sclerosis and necrosis, electrolyte imbalance, and kidney cancers.

[0859] Kidney diseases which can be diagnosed, prognosed, prevented, and/or treated with compositions of the invention include, but are not limited to, acute kidney failure, chronic kidney failure, atheroembolic renal failure, end-stage renal disease, inflammatory diseases of the kidney (e.g., acute glomerulonephritis, postinfectious glomerulonephritis, rapidly progressive glomerulonephritis, nephrotic syndrome, membranous glomerulonephritis, familial nephrotic syndrome, membranoproliferative glomerulonephritis I and II, mesangial proliferative glomerulonephritis, chronic glomerulonephritis, acute tubulointerstitial nephritis, chronic tubulointerstitial nephritis, acute post-streptococcal glomerulonephritis (PSGN), pyelonephritis, lupus nephritis, chronic nephritis, interstitial nephritis, and post-streptococcal glomerulonephritis), blood vessel disorders of the kidneys (e.g., kidney infarction, atheroembolic kidney disease, cortical necrosis, malignant nephrosclerosis, renal vein thrombosis, renal underperfusion, renal retinopathy, renal ischemia-reperfusion, renal artery embolism, and renal artery stenosis), and kidney disorders resulting form urinary tract disease (e.g., pyelonephritis, hydronephrosis, urolithiasis (renal lithiasis, nephrolithiasis), reflux nephropathy, urinary tract infections, urinary retention, and acute or chronic unilateral obstructive uropathy.)

[0860] In addition, compositions of the invention can be used to diagnose, prognose, prevent, and/or treat metabolic and congenital disorders of the kidney (e.g., uremia, renal amyloidosis, renal osteodystrophy, renal tubular acidosis, renal glycosuria, nephrogenic diabetes insipidus, cystinuria, Fanconi's syndrome, renal fibrocystic osteosis (renal rickets), Hartnup disease, Bartter's syndrome, Liddle's syndrome, polycystic kidney disease, medullary cystic disease, medullary sponge kidney, Alport's syndrome, nail-patella syndrome, congenital nephrotic syndrome, CRUSH syndrome, horseshoe kidney, diabetic nephropathy, nephrogenic diabetes insipidus, analgesic nephropathy, kidney stones, and membranous nephropathy), and autoimmune disorders of the kidney (e.g., systemic lupus erythematosus (SLE), Goodpasture syndrome, IgA nephropathy, and IgM mesangial proliferative glomerulonephritis).

[0861] Compositions of the invention can also be used to diagnose, prognose, prevent, and/or treat sclerotic or necrotic disorders of the kidney (e.g., glomerulosclerosis, diabetic nephropathy, focal segmental glomerulosclerosis (FSGS), necrotizing glomerulonephritis, and renal papillary necrosis), cancers of the kidney (e.g., nephroma, hypemephroma, nephroblastoma, renal cell cancer, transitional cell cancer, renal adenocarcinoma, squamous cell cancer, and Wilm's tumor), and electrolyte imbalances (e.g., nephrocalcinosis, pyuria, edema, hydronephritis, proteinuria, hyponatremia, hypematremia, hypokalemia, hyperkalemia, hypocalcemia, hypercalcemia, hypophosphatemia, and hyperphosphatemia).

[0862] Compositions of the invention may be administered using any method known in the art, including, but not limited to, direct needle injection at the delivery site, intravenous injection, topical administration, catheter infusion, biolistic injectors, particle accelerators, gelfoam sponge depots, other commercially available depot materials, osmotic pumps, oral or suppositorial solid pharmaceutical formulations, decanting or topical applications during surgery, aerosol delivery. Such methods are known in the art. Compositions of the invention may be administered as part of a Therapeutic, described in more detail below. Methods of delivering polynucleotides of the invention are described in more detail herein.

[0863] Cardiovascular Disorders

[0864] Albumin fusion proteins of the invention and/or polynucleotides encoding albumin fusion proteins of the invention, may be used to treat, prevent, diagnose, and/or prognose cardiovascular disorders, including, but not limited to, peripheral artery disease, such as limb ischemia.

[0865] Cardiovascular disorders include, but are not limited to, cardiovascular abnormalities, such as arterio-arterial fistula, arteriovenous fistula, cerebral arteriovenous malformations, congenital heart defects, pulmonary atresia, and Scimitar Syndrome. Congenital heart defects include, but are not limited to, aortic coarctation, cor triatriatum, coronary vessel anomalies, crisscross heart, dextrocardia, patent ductus arteriosus, Ebstein's anomaly, Eisenmenger complex, hypoplastic left heart syndrome, levocardia, tetralogy of fallot, transposition of great vessels, double outlet right ventricle, tricuspid atresia, persistent truncus arteriosus, and heart septal defects, such as aortopulmonary septal defect, endocardial cushion defects, Lutembacher's Syndrome, trilogy of Fallot, ventricular heart septal defects.

[0866] Cardiovascular disorders also include, but are not limited to, heart disease, such as arrhythmias, carcinoid heart disease, high cardiac output, low cardiac output, cardiac tamponade, endocarditis (including bacterial), heart aneurysm, cardiac arrest, congestive heart failure, congestive cardiomyopathy, paroxysmal dyspnea, cardiac edema, heart hypertrophy, congestive cardiomyopathy, left ventricular hypertrophy, right ventricular hypertrophy, post-infarction heart rupture, ventricular septal rupture, heart valve diseases, myocardial diseases, myocardial ischemia, pericardial effusion, pericarditis (including constrictive and tuberculous), pneumopericardium, postpericardiotomy syndrome, pulmonary heart disease, rheumatic heart disease, ventricular dysfunction, hyperemia, cardiovascular pregnancy complications, Scimitar Syndrome, cardiovascular syphilis, and cardiovascular tuberculosis.

[0867] Arrhythmias include, but are not limited to, sinus arrhythmia, atrial fibrillation, atrial flutter, bradycardia, extrasystole, Adams-Stokes Syndrome, bundle-branch block, sinoatrial block, long QT syndrome, parasystole, Lown-Ganong-Levine Syndrome, Mahaim-type pre-excitation syndrome, Wolff-Parkinson-White syndrome, sick sinus syndrome, tachycardias, and ventricular fibrillation. Tachycardias include paroxysmal tachycardia, supraventricular tachycardia, accelerated idioventricular rhythm, atrioventricular nodal reentry tachycardia, ectopic atrial tachycardia, ectopic junctional tachycardia, sinoatrial nodal reentry tachycardia, sinus tachycardia, Torsades de Pointes, and ventricular tachycardia.

[0868] Heart valve diseases include, but are not limited to, aortic valve insufficiency, aortic valve stenosis, hear murmurs, aortic valve prolapse, mitral valve prolapse, tricuspid valve prolapse, mitral valve insufficiency, mitral valve stenosis, pulmonary atresia, pulmonary valve insufficiency, pulmonary valve stenosis, tricuspid atresia, tricuspid valve insufficiency, and tricuspid valve stenosis.

[0869] Myocardial diseases include, but are not limited to, alcoholic cardiomyopathy, congestive cardiomyopathy, hypertrophic cardiomyopathy, aortic subvalvular stenosis, pulmonary subvalvular stenosis, restrictive cardiomyopathy, Chagas cardiomyopathy, endocardial fibroelastosis, endomyocardial fibrosis, Kearns Syndrome, myocardial reperfusion injury, and myocarditis.

[0870] Myocardial ischemias include, but are not limited to, coronary disease, such as angina pectoris, coronary aneurysm, coronary arteriosclerosis, coronary thrombosis, coronary vasospasm, myocardial infarction and myocardial stunning.

[0871] Cardiovascular diseases also include vascular diseases such as aneurysms, angiodysplasia, angiomatosis, bacillary angiomatosis, Hippel-Lindau Disease, Klippel-Trenaunay-Weber Syndrome, Sturge-Weber Syndrome, angioneurotic edema, aortic diseases, Takayasu's Arteritis, aortitis, Leriche's Syndrome, arterial occlusive diseases, arteritis, enarteritis, polyarteritis nodosa, cerebrovascular disorders, diabetic angiopathies, diabetic retinopathy, embolisms, thrombosis, erythromelalgia, hemorrhoids, hepatic veno-occlusive disease, hypertension, hypotension, ischemia, peripheral vascular diseases, phlebitis, pulmonary veno-occlusive disease, Raynaud's disease, CREST syndrome, retinal vein occlusion, Scimitar syndrome, superior vena cava syndrome, telangiectasia, atacia telangiectasia, hereditary hemorrhagic telangiectasia, varicocele, varicose veins, varicose ulcer, vasculitis, and venous insufficiency.

[0872] Aneurysms include, but are not limited to, dissecting aneurysms, false aneurysms, infected aneurysms, ruptured aneurysms, aortic aneurysms, cerebral aneurysms, coronary aneurysms, heart aneurysms, and iliac aneurysms.

[0873] Arterial occlusive diseases include, but are not limited to, arteriosclerosis, intermittent claudication, carotid stenosis, fibromuscular dysplasias, mesenteric vascular occlusion, Moyamoya disease, renal artery obstruction, retinal artery occlusion, and thromboangiitis obliterans.

[0874] Cerebrovascular disorders include, but are not limited to, carotid artery diseases, cerebral amyloid angiopathy, cerebral aneurysm, cerebral anoxia, cerebral arteriosclerosis, cerebral arteriovenous malformation, cerebral artery diseases, cerebral embolism and thrombosis, carotid artery thrombosis, sinus thrombosis, Wallenberg's syndrome, cerebral hemorrhage, epidural hematoma, subdural hematoma, subaraxhnoid hemorrhage, cerebral infarction, cerebral ischemia (including transient), subclavian steal syndrome, periventricular leukomalacia, vascular headache, cluster headache, migraine, and vertebrobasilar insufficiency.

[0875] Embolisms include, but are not limited to, air embolisms, amniotic fluid embolisms, cholesterol embolisms, blue toe syndrome, fat embolisms, pulmonary embolisms, and thromoboembolisms. Thrombosis include, but are not limited to, coronary thrombosis, hepatic vein thrombosis, retinal vein occlusion, carotid artery thrombosis, sinus thrombosis, Wallenberg's syndrome, and thrombophlebitis.

[0876] Ischemic disorders include, but are not limited to, cerebral ischemia, ischemic colitis, compartment syndromes, anterior compartment syndrome, myocardial ischemia, reperfusion injuries, and peripheral limb ischemia. Vasculitis includes, but is not limited to, aortitis, arteritis, Behcet's Syndrome, Churg-Strauss Syndrome, mucocutaneous lymph node syndrome, thromboangiitis obliterans, hypersensitivity vasculitis, Schoenlein-Henoch purpura, allergic cutaneous vasculitis, and Wegener's granulomatosis.

[0877] Albumin fusion proteins of the invention and/or polynucleotides encoding albumin fusion proteins of the invention may be administered using any method known in the art, including, but not limited to, direct needle injection at the delivery site, intravenous injection, topical administration, catheter infusion, biolistic injectors, particle accelerators, gelfoam sponge depots, other commercially available depot materials, osmotic pumps, oral or suppositorial solid pharmaceutical formulations, decanting or topical applications during surgery, aerosol delivery. Such methods are known in the art. Methods of delivering polynucleotides are described in more detail herein.

[0878] Respiratory Disorders

[0879] Albumin fusion proteins of the invention and/or polynucleotides encoding albumin fusion proteins of the invention may be used to treat, prevent, diagnose, and/or prognose diseases and/or disorders of the respiratory system.

[0880] Diseases and disorders of the respiratory system include, but are not limited to, nasal vestibulitis, nonallergic rhinitis (e.g., acute rhinitis, chronic rhinitis, atrophic rhinitis, vasomotor rhinitis), nasal polyps, and sinusitis, juvenile angiofibromas, cancer of the nose and juvenile papillomas, vocal cord polyps, nodules (singer's nodules), contact ulcers, vocal cord paralysis, laryngoceles, pharyngitis (e.g., viral and bacterial), tonsillitis, tonsillar cellulitis, parapharyngeal abscess, laryngitis, laryngoceles, and throat cancers (e.g., cancer of the nasopharynx, tonsil cancer, larynx cancer), lung cancer (e.g., squamous cell carcinoma, small cell (oat cell) carcinoma, large cell carcinoma, and adenocarcinoma), allergic disorders (eosinophilic pneumonia, hypersensitivity pneumonitis (e.g., extrinsic allergic alveolitis, allergic interstitial pneumonitis, organic dust pneumoconiosis, allergic bronchopulmonary aspergillosis, asthma, Wegener's granulomatosis (granulomatous vasculitis), Goodpasture's syndrome)), pneumonia (e.g., bacterial pneumonia (e.g., Streptococcus pneumoniae (pneumoncoccal pneumonia), Staphylococcus aureus (staphylococcal pneumonia), Gram-negative bacterial pneumonia (caused by, e.g., Klebsiella and Pseudomas spp.), Mycoplasma pneumoniae pneumonia, Hemophilus influenzae pneumonia, Legionella pneumophila (Legionnaires' disease), and Chlamydia psittaci (Psittacosis)), and viral pneumonia (e.g., influenza, chickenpox (varicella).

[0881] Additional diseases and disorders of the respiratory system include, but are not limited to bronchiolitis, polio (poliomyelitis), croup, respiratory syncytial viral infection, mumps, erythema infectiosum (fifth disease), roseola infantum, progressive rubella panencephalitis, german measles, and subacute sclerosing panencephalitis), fungal pneumonia (e.g., Histoplasmosis, Coccidioidomycosis, Blastomycosis, fungal infections in people with severely suppressed immune systems (e.g., cryptococcosis, caused by Cryptococcus neoformans; aspergillosis, caused by Aspergillus spp.; candidiasis, caused by Candida; and mucormycosis)), Pneumocystis carinii (pneumocystis pneumonia), atypical pneumonias (e.g., Mycoplasma and Chlamydia spp.), opportunistic infection pneumonia, nosocomial pneumonia, chemical pneumonitis, and aspiration pneumonia, pleural disorders (e.g., pleurisy, pleural effusion, and pneumothorax (e.g., simple spontaneous pneumothorax, complicated spontaneous pneumothorax, tension pneumothorax)), obstructive airway diseases (e.g., asthma, chronic obstructive pulmonary disease (COPD), emphysema, chronic or acute bronchitis), occupational lung diseases (e.g., silicosis, black lung (coal workers' pneumoconiosis), asbestosis, berylliosis, occupational asthsma, byssinosis, and benign pneumoconioses), Infiltrative Lung Disease (e.g., pulmonary fibrosis (e.g., fibrosing alveolitis, usual interstitial pneumonia), idiopathic pulmonary fibrosis, desquamative interstitial pneumonia, lymphoid interstitial pneumonia, histiocytosis X (e.g., Letterer-Siwe disease, Hand-Schiüller-Christian disease, eosinophilic granuloma), idiopathic pulmonary hemosiderosis, sarcoidosis and pulmonary alveolar proteinosis), Acute respiratory distress syndrome (also called, e.g., adult respiratory distress syndrome), edema, pulmonary embolism, bronchitis (e.g., viral, bacterial), bronchiectasis, atelectasis, lung abscess (caused by, e.g., Staphylococcus aureus or Legionella pneumophila), and cystic fibrosis.

[0882] Anti-Angiogenesis Activity

[0883] The naturally occurring balance between endogenous stimulators and inhibitors of angiogenesis is one in which inhibitory influences predominate. Rastinejad et al., Cell 56:345-355 (1989). In those rare instances in which neovascularization occurs under normal physiological conditions, such as wound healing, organ regeneration, embryonic development, and female reproductive processes, angiogenesis is stringently regulated and spatially and temporally delimited. Under conditions of pathological angiogenesis such as that characterizing solid tumor growth, these regulatory controls fail. Unregulated angiogenesis becomes pathologic and sustains progression of many neoplastic and non-neoplastic diseases. A number of serious diseases are dominated by abnormal neovascularization including solid tumor growth and metastases, arthritis, some types of eye disorders, and psoriasis. See, e.g., reviews by Moses et al., Biotech. 9:630-634 (1991); Folkman et al., N. Engl. J. Med., 333:1757-1763 (1995); Auerbach et al., J. Microvasc. Res. 29:401-411 (1985); Folkman, Advances in Cancer Research, eds. Klein and Weinhouse, Academic Press, New York, pp. 175-203 (1985); Patz, Am. J. Opthalmol. 94:715-743 (1982); and Folkman et al., Science 221:719-725 (1983). In a number of pathological conditions, the process of angiogenesis contributes to the disease state. For example, significant data have accumulated which suggest that the growth of solid tumors is dependent on angiogenesis. Folkman and Klagsbrun, Science 235:442-447 (1987).

[0884] The present invention provides for treatment of diseases or disorders associated with neovascularization by administration of fusion proteins of the invention and/or polynucleotides encoding albumin fusion proteins of the invention. Malignant and metastatic conditions which can be treated with the polynucleotides and polypeptides, or agonists or antagonists of the invention include, but are not limited to, malignancies, solid tumors, and cancers described herein and otherwise known in the art (for a review of such disorders, see Fishman et al., Medicine, 2d Ed., J. B. Lippincott Co., Philadelphia (1985)). Thus, the present invention provides a method of treating an angiogenesis-related disease and/or disorder, comprising administering to an individual in need thereof a therapeutically effective amount of an albumin fusion protein of the invention and/or polynucleotides encoding an albumin fusion protein of the invention. For example, fusion proteins of the invention and/or polynucleotides encoding albumin fusion proteins of the invention may be utilized in a variety of additional methods in order to therapeutically treat a cancer or tumor. Cancers which may be treated with fusion proteins of the invention and/or polynucleotides encoding albumin fusion proteins of the invention include, but are not limited to solid tumors, including prostate, lung, breast, ovarian, stomach, pancreas, larynx, esophagus, testes, liver, parotid, biliary tract, colon, rectum, cervix, uterus, endometrium, kidney, bladder, thyroid cancer; primary tumors and metastases; melanomas; glioblastoma; Kaposi's sarcoma; leiomyosarcoma; non-small cell lung cancer; colorectal cancer; advanced malignancies; and blood born tumors such as leukemias. For example, fusion proteins of the invention and/or polynucleotides encoding albumin fusion proteins of the invention may be delivered topically, in order to treat cancers such as skin cancer, head and neck tumors, breast tumors, and Kaposi's sarcoma.

[0885] Within yet other aspects, fusion proteins of the invention and/or polynucleotides encoding albumin fusion proteins of the invention may be utilized to treat superficial forms of bladder cancer by, for example, intravesical administration. Albumin fusion proteins of the invention and/or polynucleotides encoding albumin fusion proteins of the invention may be delivered directly into the tumor, or near the tumor site, via injection or a catheter. Of course, as the artisan of ordinary skill will appreciate, the appropriate mode of administration will vary according to the cancer to be treated. Other modes of delivery are discussed herein.

[0886] Albumin fusion proteins of the invention and/or polynucleotides encoding albumin fusion proteins of the invention may be useful in treating other disorders, besides cancers, which involve angiogenesis. These disorders include, but are not limited to: benign tumors, for example hemangiomas, acoustic neuromas, neurofibromas, trachomas, and pyogenic granulomas; artheroscleric plaques; ocular angiogenic diseases, for example, diabetic retinopathy, retinopathy of prematurity, macular degeneration, corneal graft rejection, neovascular glaucoma, retrolental fibroplasia, rubeosis, retinoblastoma, uvietis and Pterygia (abnormal blood vessel growth) of the eye; rheumatoid arthritis; psoriasis; delayed wound healing; endometriosis; vasculogenesis; granulations; hypertrophic scars (keloids); nonunion fractures; scleroderma; trachoma; vascular adhesions; myocardial angiogenesis; coronary collaterals; cerebral collaterals; arteriovenous malformations; ischemic limb angiogenesis; Osler-Webber Syndrome; plaque neovascularization; telangiectasia; hemophiliac joints; angiofibroma; fibromuscular dysplasia; wound granulation; Crohn's disease; and atherosclerosis.

[0887] For example, within one aspect of the present invention methods are provided for treating hypertrophic scars and keloids, comprising the step of administering albumin fusion proteins of the invention and/or polynucleotides encoding albumin fusion proteins of the invention to a hypertrophic scar or keloid.

[0888] Within one embodiment of the present invention fusion proteins of the invention and/or polynucleotides encoding albumin fusion proteins of the invention are directly injected into a hypertrophic scar or keloid, in order to prevent the progression of these lesions. This therapy is of particular value in the prophylactic treatment of conditions which are known to result in the development of hypertrophic scars and keloids (e.g., burns), and is preferably initiated after the proliferative phase has had time to progress (approximately 14 days after the initial injury), but before hypertrophic scar or keloid development. As noted above, the present invention also provides methods for treating neovascular diseases of the eye, including for example, corneal neovascularization, neovascular glaucoma, proliferative diabetic retinopathy, retrolental fibroplasia and macular degeneration.

[0889] Moreover, Ocular disorders associated with neovascularization which can be treated with the albumin fusion proteins of the invention and/or polynucleotides encoding albumin fusion proteins of the invention include, but are not limited to: neovascular glaucoma, diabetic retinopathy, retinoblastoma, retrolental fibroplasia, uveitis, retinopathy of prematurity macular degeneration, corneal graft neovascularization, as well as other eye inflammatory diseases, ocular tumors and diseases associated with choroidal or iris neovascularization. See, e.g., reviews by Waltman et al., Am. J. Ophthal. 85:704-710 (1978) and Gartner et al., Surv. Ophthal. 22:291-312 (1978).

[0890] Thus, within one aspect of the present invention methods are provided for treating neovascular diseases of the eye such as corneal neovascularization (including corneal graft neovascularization), comprising the step of administering to a patient a therapeutically effective amount of a compound (e.g., fusion proteins of the invention and/or polynucleotides encoding albumin fusion proteins of the invention) to the cornea, such that the formation of blood vessels is inhibited. Briefly, the cornea is a tissue which normally lacks blood vessels. In certain pathological conditions however, capillaries may extend into the cornea from the pericorneal vascular plexus of the limbus. When the cornea becomes vascularized, it also becomes clouded, resulting in a decline in the patient's visual acuity. Visual loss may become complete if the cornea completely opacitates. A wide variety of disorders can result in corneal neovascularization, including for example, corneal infections (e.g., trachoma, herpes simplex keratitis, leishmaniasis and onchocerciasis), immunological processes (e.g., graft rejection and Stevens-Johnson's syndrome), alkali burns, trauma, inflammation (of any cause), toxic and nutritional deficiency states, and as a complication of wearing contact lenses.

[0891] Within particularly preferred embodiments of the invention, may be prepared for topical administration in saline (combined with any of the preservatives and antimicrobial agents commonly used in ocular preparations), and administered in eyedrop form. The solution or suspension may be prepared in its pure form and administered several times daily. Alternatively, anti-angiogenic compositions, prepared as described above, may also be administered directly to the cornea. Within preferred embodiments, the anti-angiogenic composition is prepared with a muco-adhesive polymer which binds to cornea. Within further embodiments, the anti-angiogenic factors or anti-angiogenic compositions may be utilized as an adjunct to conventional steroid therapy. Topical therapy may also be useful prophylactically in corneal lesions which are known to have a high probability of inducing an angiogenic response (such as chemical burns). In these instances the treatment, likely in combination with steroids, may be instituted immediately to help prevent subsequent complications.

[0892] Within other embodiments, the compounds described above may be injected directly into the corneal stroma by an ophthalmologist under microscopic guidance. The preferred site of injection may vary with the morphology of the individual lesion, but the goal of the administration would be to place the composition at the advancing front of the vasculature (i.e., interspersed between the blood vessels and the normal cornea). In most cases this would involve perilimbic corneal injection to “protect” the cornea from the advancing blood vessels. This method may also be utilized shortly after a corneal insult in order to prophylactically prevent corneal neovascularization. In this situation the material could be injected in the perilimbic cornea interspersed between the corneal lesion and its undesired potential limbic blood supply. Such methods may also be utilized in a similar fashion to prevent capillary invasion of transplanted corneas. In a sustained-release form injections might only be required 2-3 times per year. A steroid could also be added to the injection solution to reduce inflammation resulting from the injection itself.

[0893] Within another aspect of the present invention, methods are provided for treating neovascular glaucoma, comprising the step of administering to a patient a therapeutically effective amount of an albumin fusion protein of the invention and/or polynucleotides encoding an albumin fusion protein of the invention to the eye, such that the formation of blood vessels is inhibited. In one embodiment, the compound may be administered topically to the eye in order to treat early forms of neovascular glaucoma. Within other embodiments, the compound may be implanted by injection into the region of the anterior chamber angle. Within other embodiments, the compound may also be placed in any location such that the compound is continuously released into the aqueous humor. Within another aspect of the present invention, methods are provided for treating proliferative diabetic retinopathy, comprising the step of administering to a patient a therapeutically effective amount of an albumin fusion protein of the invention and/or polynucleotides encoding an albumin fusion protein of the invention to the eyes, such that the formation of blood vessels is inhibited.

[0894] Within particularly preferred embodiments of the invention, proliferative diabetic retinopathy may be treated by injection into the aqueous humor or the vitreous, in order to increase the local concentration of the polynucleotide, polypeptide, antagonist and/or agonist in the retina. Preferably, this treatment should be initiated prior to the acquisition of severe disease requiring photocoagulation.

[0895] Within another aspect of the present invention, methods are provided for treating retrolental fibroplasia, comprising the step of administering to a patient a therapeutically effective amount of an albumin fusion protein of the invention and/or polynucleotides encoding an albumin fusion protein of the invention to the eye, such that the formation of blood vessels is inhibited. The compound may be administered topically, via intravitreous injection and/or via intraocular implants.

[0896] Additionally, disorders which can be treated with fusion proteins of the invention and/or polynucleotides encoding albumin fusion proteins of the invention include, but are not limited to, hemangioma, arthritis, psoriasis, angiofibroma, atherosclerotic plaques, delayed wound healing, granulations, hemophilic joints, hypertrophic scars, nonunion fractures, Osler-Weber syndrome, pyogenic granuloma, scleroderma, trachoma, and vascular adhesions.

[0897] Moreover, disorders and/or states, which can be treated, prevented, diagnosed, and/or prognosed with the albumin fusion proteins of the invention and/or polynucleotides encoding albumin fusion proteins of the invention of the invention include, but are not limited to, solid tumors, blood born tumors such as leukemias, tumor metastasis, Kaposi's sarcoma, benign tumors, for example hemangiomas, acoustic neuromas, neurofibromas, trachomas, and pyogenic granulomas, rheumatoid arthritis, psoriasis, ocular angiogenic diseases, for example, diabetic retinopathy, retinopathy of prematurity, macular degeneration, corneal graft rejection, neovascular glaucoma, retrolental fibroplasia, rubeosis, retinoblastoma, and uvietis, delayed wound healing, endometriosis, vascluogenesis, granulations, hypertrophic scars (keloids), nonunion fractures, scleroderma, trachoma, vascular adhesions, myocardial angiogenesis, coronary collaterals, cerebral collaterals, arteriovenous malformations, ischemic limb angiogenesis, Osler-Webber Syndrome, plaque neovascularization, telangiectasia, hemophiliac joints, angiofibroma fibromuscular dysplasia, wound granulation, Crohn's disease, atherosclerosis, birth control agent by preventing vascularization required for embryo implantation controlling menstruation, diseases that have angiogenesis as a pathologic consequence such as cat scratch disease (Rochele minalia quintosa), ulcers (Helicobacter pylori), Bartonellosis and bacillary angiomatosis.

[0898] In one aspect of the birth control method, an amount of the compound sufficient to block embryo implantation is administered before or after intercourse and fertilization have occurred, thus providing an effective method of birth control, possibly a “morning after” method. Albumin fusion proteins of the invention and/or polynucleotides encoding albumin fusion proteins of the invention may also be used in controlling menstruation or administered as either a peritoneal lavage fluid or for peritoneal implantation in the treatment of endometriosis.

[0899] Albumin fusion proteins of the invention and/or polynucleotides encoding albumin fusion proteins of the invention may be incorporated into surgical sutures in order to prevent stitch granulomas.

[0900] Albumin fusion proteins of the invention and/or polynucleotides encoding albumin fusion proteins of the invention may be utilized in a wide variety of surgical procedures. For example, within one aspect of the present invention a compositions (in the form of, for example, a spray or film) may be utilized to coat or spray an area prior to removal of a tumor, in order to isolate normal surrounding tissues from malignant tissue, and/or to prevent the spread of disease to surrounding tissues. Within other aspects of the present invention, compositions (e.g., in the form of a spray) may be delivered via endoscopic procedures in order to coat tumors, or inhibit angiogenesis in a desired locale. Within yet other aspects of the present invention, surgical meshes which have been coated with anti-angiogenic compositions of the present invention may be utilized in any procedure wherein a surgical mesh might be utilized. For example, within one embodiment of the invention a surgical mesh laden with an anti-angiogenic composition may be utilized during abdominal cancer resection surgery (e.g., subsequent to colon resection) in order to provide support to the structure, and to release an amount of the anti-angiogenic factor.

[0901] Within further aspects of the present invention, methods are provided for treating tumor excision sites, comprising administering albumin fusion proteins of the invention and/or polynucleotides encoding albumin fusion proteins of the invention to the resection margins of a tumor subsequent to excision, such that the local recurrence of cancer and the formation of new blood vessels at the site is inhibited. Within one embodiment of the invention, the anti-angiogenic compound is administered directly to the tumor excision site (e.g., applied by swabbing, brushing or otherwise coating the resection margins of the tumor with the anti-angiogenic compound). Alternatively, the anti-angiogenic compounds may be incorporated into known surgical pastes prior to administration. Within particularly preferred embodiments of the invention, the anti-angiogenic compounds are applied after hepatic resections for malignancy, and after neurosurgical operations.

[0902] Within one aspect of the present invention, fusion proteins of the invention and/or polynucleotides encoding albumin fusion proteins of the invention may be administered to the resection margin of a wide variety of tumors, including for example, breast, colon, brain and hepatic tumors. For example, within one embodiment of the invention, anti-angiogenic compounds may be administered to the site of a neurological tumor subsequent to excision, such that the formation of new blood vessels at the site are inhibited.

[0903] The albumin fusion proteins of the invention and/or polynucleotides encoding albumin fusion proteins of the invention may also be administered along with other anti-angiogenic factors. Representative examples of other anti-angiogenic factors include: Anti-invasive Factor, retinoic acid and derivatives thereof, paclitaxel, Suramin, Tissue Inhibitor of Metalloproteinase-1, Tissue Inhibitor of Metalloproteinase-2, Plasminogen Activator Inhibitor-1, Plasminogen Activator Inhibitor-2, and various forms of the lighter “d group” transition metals.

[0904] Lighter “d group” transition metals include, for example, vanadium, molybdenum, tungsten, titanium, niobium, and tantalum species. Such transition metal species may form transition metal complexes. Suitable complexes of the above-mentioned transition metal species include oxo transition metal complexes.

[0905] Representative examples of vanadium complexes include oxo vanadium complexes such as vanadate and vanadyl complexes. Suitable vanadate complexes include metavanadate and orthovanadate complexes such as, for example, ammonium metavanadate, sodium metavanadate, and sodium orthovanadate. Suitable vanadyl complexes include, for example, vanadyl acetylacetonate and vanadyl sulfate including vanadyl sulfate hydrates such as vanadyl sulfate mono- and trihydrates.

[0906] Representative examples of tungsten and molybdenum complexes also include oxo complexes. Suitable oxo tungsten complexes include tungstate and tungsten oxide complexes. Suitable tungstate complexes include ammonium tungstate, calcium tungstate, sodium tungstate dihydrate, and tungstic acid. Suitable tungsten oxides include tungsten (IV) oxide and tungsten (VI) oxide. Suitable oxo molybdenum complexes include molybdate, molybdenum oxide, and molybdenyl complexes. Suitable molybdate complexes include ammonium molybdate and its hydrates, sodium molybdate and its hydrates, and potassium molybdate and its hydrates. Suitable molybdenum oxides include molybdenum (VI) oxide, molybdenum (VI) oxide, and molybdic acid. Suitable molybdenyl complexes include, for example, molybdenyl acetylacetonate. Other suitable tungsten and molybdenum complexes include hydroxo derivatives derived from, for example, glycerol, tartaric acid, and sugars.

[0907] A wide variety of other anti-angiogenic factors may also be utilized within the context of the present invention. Representative examples include platelet factor 4; protamine sulphate; sulphated chitin derivatives (prepared from queen crab shells), (Murata et al., Cancer Res. 51:22-26, 1991); Sulphated Polysaccharide Peptidoglycan Complex (SP-PG) (the function of this compound may be enhanced by the presence of steroids such as estrogen, and tamoxifen citrate); Staurosporine; modulators of matrix metabolism, including for example, proline analogs, cishydroxyproline, d,L-3,4-dehydroproline, Thiaproline, alpha,alpha-dipyridyl, aminopropionitrile fumarate; 4-propyl-5-(4-pyridinyl)-2(3H)-oxazolone; Methotrexate; Mitoxantrone; Heparin; Interferons; 2 Macroglobulin-serum; ChIMP-3 (Pavloff et al., J. Bio. Chem. 267:17321-17326, (1992)); Chymostatin (Tomkinson et al., Biochem J. 286:475-480, (1992)); Cyclodextrin Tetradecasulfate; Eponemycin; Camptothecin; Fumagillin (Ingber et al., Nature 348:555-557, 1990); Gold Sodium Thiomalate (“GST”; Matsubara and Ziff, J. Clin. Invest. 79:1440-1446, (1987)); anticollagenase-serum; alpha2-antiplasmin (Holmes et al., J. Biol. Chem. 262(4): 1659-1664, (1987)); Bisantrene (National Cancer Institute); Lobenzarit disodium (N-(2)-carboxyphenyl-4-chloroanthronilic acid disodium or “CCA”; Takeuchi et al., Agents Actions 36:312-316, (1992)); Thalidomide; Angiostatic steroid; AGM-1470; carboxynaminolmidazole; and metalloproteinase inhibitors such as BB94.

[0908] Diseases at the Cellular Level

[0909] Diseases associated with increased cell survival or the inhibition of apoptosis that could be treated, prevented, diagnosed, and/or prognosed using fusion proteins of the invention and/or polynucleotides encoding albumin fusion proteins of the invention, include cancers (such as follicular lymphomas, carcinomas with p53 mutations, and hormone-dependent tumors, including, but not limited to colon cancer, cardiac tumors, pancreatic cancer, melanoma, retinoblastoma, glioblastoma, lung cancer, intestinal cancer, testicular cancer, stomach cancer, neuroblastoma, myxoma, myoma, lymphoma, endothelioma, osteoblastoma, osteoclastoma, osteosarcoma, chondrosarcoma, adenoma, breast cancer, prostate cancer, Kaposi's sarcoma and ovarian cancer); autoimmune disorders (such as, multiple sclerosis, Sjogren's syndrome, Hashimoto's thyroiditis, biliary cirrhosis., Behcet's disease, Crohn's disease, polymyositis, systemic lupus erythematosus and immune-related glomerulonephritis and rheumatoid arthritis) and viral infections (such as herpes viruses, pox viruses and adenoviruses), inflammation, graft v. host disease, acute graft rejection, and chronic graft rejection.

[0910] In preferred embodiments, fusion proteins of the invention and/or polynucleotides encoding albumin fusion proteins of the invention are used to inhibit growth, progression, and/or metasis of cancers, in particular those listed above.

[0911] Additional diseases or conditions associated with increased cell survival that could be treated or detected by fusion proteins of the invention and/or polynucleotides encoding albumin fusion proteins of the invention include, but are not limited to, progression, and/or metastases of malignancies and related disorders such as leukemia (including acute leukemias (e.g., acute lymphocytic leukemia, acute myelocytic leukemia (including myeloblastic, promyelocytic, myelomonocytic, monocytic, and erythroleukemia)) and chronic leukemias (e.g., chronic myelocytic (granulocytic) leukemia and chronic lymphocytic leukemia)), polycythemia vera, lymphomas (e.g., Hodgkin's disease and non-Hodgkin's disease), multiple myeloma, Waldenstrom's macroglobulinemia, heavy chain disease, and solid tumors including, but not limited to, sarcomas and carcinomas such as fibrosarcoma, myxosarcoma, liposarcoma, chondrosarcoma, osteogenic sarcoma, chordoma, angiosarcoma, endotheliosarcoma, lymphangiosarcoma, lymphangioendotheliosarcoma, synovioma, mesothelioma, Ewing's tumor, leiomyosarcoma, rhabdomyosarcoma, colon carcinoma, pancreatic cancer, breast cancer, ovarian cancer, prostate cancer, squamous cell carcinoma, basal cell carcinoma, adenocarcinoma, sweat gland carcinoma, sebaceous gland carcinoma, papillary carcinoma, papillary adenocarcinomas, cystadenocarcinoma, medullary carcinoma, bronchogenic carcinoma, renal cell carcinoma, hepatoma, bile duct carcinoma, choriocarcinoma, seminoma, embryonal carcinoma, Wilm's tumor, cervical cancer, testicular tumor, lung carcinoma, small cell lung carcinoma, bladder carcinoma, epithelial carcinoma, glioma, astrocytoma, medulloblastoma, craniopharyngioma, ependymoma, pinealoma, hemangioblastoma, acoustic neuroma, oligodendroglioma, menangioma, melanoma, neuroblastoma, and retinoblastoma.

[0912] Diseases associated with increased apoptosis that could be treated, prevented, diagnosed, and/or prognosed using fusion proteins of the invention and/or polynucleotides encoding albumin fusion proteins of the invention, include, but are not limited to, AIDS; neurodegenerative disorders (such as Alzheimer's disease, Parkinson's disease, Amyotrophic lateral sclerosis, Retinitis pigmentosa, Cerebellar degeneration and brain tumor or prior associated disease); autoimmune disorders (such as, multiple sclerosis, Sjogren's syndrome, Hashimoto's thyroiditis, biliary cirrhosis, Behcet's disease, Crohn's disease, polymyositis, systemic lupus erythematosus and immune-related glomerulonephritis and rheumatoid arthritis) myelodysplastic syndromes (such as aplastic anemia), graft v. host disease, ischemic injury (such as that caused by myocardial infarction, stroke and reperfusion injury), liver injury (e.g., hepatitis related liver injury, ischemia/reperfusion injury, cholestosis (bile duct injury) and liver cancer); toxin-induced liver disease (such as that caused by alcohol), septic shock, cachexia and anorexia.

[0913] Wound Healing and Epithelial Cell Proliferation

[0914] In accordance with yet a further aspect of the present invention, there is provided a process for utilizing fusion proteins of the invention and/or polynucleotides encoding albumin fusion proteins of the invention, for therapeutic purposes, for example, to stimulate epithelial cell proliferation and basal keratinocytes for the purpose of wound healing, and to stimulate hair follicle production and healing of dermal wounds. Albumin fusion proteins of the invention and/or polynucleotides encoding albumin fusion proteins of the invention, may be clinically useful in stimulating wound healing including surgical wounds, excisional wounds, deep wounds involving damage of the dermis and epidermis, eye tissue wounds, dental tissue wounds, oral cavity wounds, diabetic ulcers, dermal ulcers, cubitus ulcers, arterial ulcers, venous stasis ulcers, burns resulting from heat exposure or chemicals, and other abnormal wound healing conditions such as uremia, malnutrition, vitamin deficiencies and complications associated with systemic treatment with steroids, radiation therapy and antineoplastic drugs and antimetabolites. Albumin fusion proteins of the invention and/or polynucleotides encoding albumin fusion proteins of the invention, could be used to promote dermal reestablishment subsequent to dermal loss

[0915] Albumin fusion proteins of the invention and/or polynucleotides encoding albumin fusion proteins of the invention, could be used to increase the adherence of skin grafts to a wound bed and to stimulate re-epithelialization from the wound bed. The following are types of grafts that fusion proteins of the invention and/or polynucleotides encoding albumin fusion proteins of the invention, could be used to increase adherence to a wound bed: autografts, artificial skin, allografts, autodermic graft, autoepdermic grafts, avacular grafts, Blair-Brown grafts, bone graft, brephoplastic grafts, cutis graft, delayed graft, dermic graft, epidermic graft, fascia graft, full thickness graft, heterologous graft, xenograft, homologous graft, hyperplastic graft, lamellar graft, mesh graft, mucosal graft, Ollier-Thiersch graft, omenpal graft, patch graft, pedicle graft, penetrating graft, split skin graft, thick split graft. Albumin fusion proteins of the invention and/or polynucleotides encoding albumin fusion proteins of the invention, can be used to promote skin strength and to improve the appearance of aged skin.

[0916] It is believed that fusion proteins of the invention and/or polynucleotides encoding albumin fusion proteins of the invention, will also produce changes in hepatocyte proliferation, and epithelial cell proliferation in the lung, breast, pancreas, stomach, small intestine, and large intestine. Albumin fusion proteins of the invention and/or polynucleotides encoding albumin fusion proteins of the invention, could promote proliferation of epithelial cells such as sebocytes, hair follicles, hepatocytes, type II pneumocytes, mucin-producing goblet cells, and other epithelial cells and their progenitors contained within the skin, lung, liver, and gastrointestinal tract. Albumin fusion proteins of the invention and/or polynucleotides encoding albumin fusion proteins of the invention, may promote proliferation of endothelial cells, keratinocytes, and basal keratinocytes.

[0917] Albumin fusion proteins of the invention and/or polynucleotides encoding albumin fusion proteins of the invention, could also be used to reduce the side effects of gut toxicity that result from radiation, chemotherapy treatments or viral infections. Albumin fusion proteins of the invention and/or polynucleotides encoding albumin fusion proteins of the invention, may have a cytoprotective effect on the small intestine mucosa. Albumin fusion proteins of the invention and/or polynucleotides encoding albumin fusion proteins of the invention, may also stimulate healing of mucositis (mouth ulcers) that result from chemotherapy and viral infections.

[0918] Albumin fusion proteins of the invention and/or polynucleotides encoding albumin fusion proteins of the invention, could further be used in full regeneration of skin in full and partial thickness skin defects, including burns, (i.e., repopulation of hair follicles, sweat glands, and sebaceous glands), treatment of other skin defects such as psoriasis. Albumin fusion proteins of the invention and/or polynucleotides encoding albumin fusion proteins of the invention, could be used to treat epidermolysis bullosa, a defect in adherence of the epidermis to the underlying dermis which results in frequent, open and painful blisters by accelerating reepithelialization of these lesions. Albumin fusion proteins of the invention and/or polynucleotides encoding albumin fusion proteins of the invention, could also be used to treat gastric and doudenal ulcers and help heal by scar formation of the mucosal lining and regeneration of glandular mucosa and duodenal mucosal lining more rapidly. Inflammatory bowel diseases, such as Crohn's disease and ulcerative colitis, are diseases which result in destruction of the mucosal surface of the small or large intestine, respectively. Thus, fusion proteins of the invention and/or polynucleotides encoding albumin fusion proteins of the invention, could be used to promote the resurfacing of the mucosal surface to aid more rapid healing and to prevent progression of inflammatory bowel disease. Treatment with fusion proteins of the invention and/or polynucleotides encoding albumin fusion proteins of the invention, is expected to have a significant effect on the production of mucus throughout the gastrointestinal tract and could be used to protect the intestinal mucosa from injurious substances that are ingested or following surgery. Albumin fusion proteins of the invention and/or polynucleotides encoding albumin fusion proteins of the invention, could be used to treat diseases associate with the under expression.

[0919] Moreover, fusion proteins of the invention and/or polynucleotides encoding albumin fusion proteins of the invention, could be used to prevent and heal damage to the lungs due to various pathological states. Albumin fusion proteins of the invention and/or polynucleotides encoding albumin fusion proteins of the invention, which could stimulate proliferation and differentiation and promote the repair of alveoli and brochiolar epithelium to prevent or treat acute or chronic lung damage. For example, emphysema, which results in the progressive loss of aveoli, and inhalation injuries, i.e., resulting from smoke inhalation and burns, that cause necrosis of the bronchiolar epithelium and alveoli could be effectively treated using polynucleotides or polypeptides, agonists or antagonists of the present invention. Also fusion proteins of the invention and/or polynucleotides encoding albumin fusion proteins of the invention, could be used to stimulate the proliferation of and differentiation of type II pneumocytes, which may help treat or prevent disease such as hyaline membrane diseases, such as infant respiratory distress syndrome and bronchopulmonary displasia, in premature infants.

[0920] Albumin fusion proteins of the invention and/or polynucleotides encoding albumin fusion proteins of the invention, could stimulate the proliferation and differentiation of hepatocytes and, thus, could be used to alleviate or treat liver diseases and pathologies such as fulminant liver failure caused by cirrhosis, liver damage caused by viral hepatitis and toxic substances (i.e., acetaminophen, carbon tetrachloride and other hepatotoxins known in the art).

[0921] In addition, fusion proteins of the invention and/or polynucleotides encoding albumin fusion proteins of the invention, could be used treat or prevent the onset of diabetes mellitus. In patients with newly diagnosed Types I and II diabetes, where some islet cell function remains, fusion proteins of the invention and/or polynucleotides encoding albumin fusion proteins of the invention, could be used to maintain the islet function so as to alleviate, delay or prevent permanent manifestation of the disease. Also, fusion proteins of the invention and/or polynucleotides encoding albumin fusion proteins of the invention, could be used as an auxiliary in islet cell transplantation to improve or promote islet cell function.

[0922] Neural Activity and Neurological Diseases

[0923] The albumin fusion proteins of the invention and/or polynucleotides encoding albumin fusion proteins of the invention may be used for the diagnosis and/or treatment of diseases, disorders, damage or injury of the brain and/or nervous system. Nervous system disorders that can be treated with the compositions of the invention (e.g., fusion proteins of the invention and/or polynucleotides encoding albumin fusion proteins of the invention), include, but are not limited to, nervous system injuries, and diseases or disorders which result in either a disconnection of axons, a diminution or degeneration of neurons, or demyelination. Nervous system lesions which may be treated in a patient (including human and non-human mammalian patients) according to the methods of the invention, include but are not limited to, the following lesions of either the central (including spinal cord, brain) or peripheral nervous systems: (1) ischemic lesions, in which a lack of oxygen in a portion of the nervous system results in neuronal injury or death, including cerebral infarction or ischemia, or spinal cord infarction or ischemia; (2) traumatic lesions, including lesions caused by physical injury or associated with surgery, for example, lesions which sever a portion of the nervous system, or compression injuries; (3) malignant lesions, in which a portion of the nervous system is destroyed or injured by malignant tissue which is either a nervous system associated malignancy or a malignancy derived from non-nervous system tissue; (4) infectious lesions, in which a portion of the nervous system is destroyed or injured as a result of infection, for example, by an abscess or associated with infection by human immunodeficiency virus, herpes zoster, or herpes simplex virus or with Lyme disease, tuberculosis, or syphilis; (5) degenerative lesions, in which a portion of the nervous system is destroyed or injured as a result of a degenerative process including but not limited to, degeneration associated with Parkinson's disease, Alzheimer's disease, Huntington's chorea, or amyotrophic lateral sclerosis (ALS); (6) lesions associated with nutritional diseases or disorders, in which a portion of the nervous system is destroyed or injured by a nutritional disorder or disorder of metabolism including, but not limited to, vitamin B12 deficiency, folic acid deficiency, Wernicke disease, tobacco-alcohol amblyopia, Marchiafava-Bignami disease (primary degeneration of the corpus callosum), and alcoholic cerebellar degeneration; (7) neurological lesions associated with systemic diseases including, but not limited to, diabetes (diabetic neuropathy, Bell's palsy), systemic lupus erythematosus, carcinoma, or sarcoidosis; (8) lesions caused by toxic substances including alcohol, lead, or particular neurotoxins; and (9) demyelinated lesions in which a portion of the nervous system is destroyed or injured by a demyelinating disease including, but not limited to, multiple sclerosis, human immunodeficiency virus-associated myelopathy, transverse myelopathy or various etiologies, progressive multifocal leukoencephalopathy, and central pontine myelinolysis.

[0924] In one embodiment, the albumin fusion proteins of the invention and/or polynucleotides encoding albumin fusion proteins of the invention are used to protect neural cells from the damaging effects of hypoxia. In a further preferred embodiment, the albumin fusion proteins of the invention and/or polynucleotides encoding albumin fusion proteins of the invention are used to protect neural cells from the damaging effects of cerebral hypoxia. According to this embodiment, the compositions of the invention are used to treat or prevent neural cell injury associated with cerebral hypoxia. In one non-exclusive aspect of this embodiment, the albumin fusion proteins of the invention and/or polynucleotides encoding albumin fusion proteins of the invention, are used to treat or prevent neural cell injury associated with cerebral ischemia. In another non-exclusive aspect of this embodiment, the albumin fusion proteins of the invention and/or polynucleotides encoding albumin fusion proteins of the invention are used to treat or prevent neural cell injury associated with cerebral infarction.

[0925] In another preferred embodiment, albumin fusion proteins of the invention and/or polynucleotides encoding albumin fusion proteins of the invention are used to treat or prevent neural cell injury associated with a stroke. In a specific embodiment, albumin fusion proteins of the invention and/or polynucleotides encoding albumin fusion proteins of the invention are used to treat or prevent cerebral neural cell injury associated with a stroke.

[0926] In another preferred embodiment, albumin fusion proteins of the invention and/or polynucleotides encoding albumin fusion proteins of the invention are used to treat or prevent neural cell injury associated with a heart attack. In a specific embodiment, albumin fusion proteins of the invention and/or polynucleotides encoding albumin fusion proteins of the invention are used to treat or prevent cerebral neural cell injury associated with a heart attack.

[0927] The compositions of the invention which are useful for treating or preventing a nervous system disorder may be selected by testing for biological activity in promoting the survival or differentiation of neurons. For example, and not by way of limitation, compositions of the invention which elicit any of the following effects may be useful according to the invention: (1) increased survival time of neurons in culture either in the presence or absence of hypoxia or hypoxic conditions; (2) increased sprouting of neurons in culture or in vivo; (3) increased production of a neuron-associated molecule in culture or in vivo, e.g., choline acetyltransferase or acetylcholinesterase with respect to motor neurons; or (4) decreased symptoms of neuron dysfunction in vivo. Such effects may be measured by any method known in the art. In preferred, non-limiting embodiments, increased survival of neurons may routinely be measured using a method set forth herein or otherwise known in the art, such as, for example, in Zhang et al., Proc Natl Acad Sci USA 97:3637-42 (2000) or in Arakawa et al., J. Neurosci., 10:3507-15 (1990); increased sprouting of neurons may be detected by methods known in the art, such as, for example, the methods set forth in Pestronk et al., Exp. Neurol., 70:65-82 (1980), or Brown et al., Ann. Rev. Neurosci., 4:17-42 (1981); increased production of neuron-associated molecules may be measured by bioassay, enzymatic assay, antibody binding, Northern blot assay, etc., using techniques known in the art and depending on the molecule to be measured; and motor neuron dysfunction may be measured by assessing the physical manifestation of motor neuron disorder, e.g., weakness, motor neuron conduction velocity, or functional disability.

[0928] In specific embodiments, motor neuron disorders that may be treated according to the invention include, but are not limited to, disorders such as infarction, infection, exposure to toxin, trauma, surgical damage, degenerative disease or malignancy that may affect motor neurons as well as other components of the nervous system, as well as disorders that selectively affect neurons such as amyotrophic lateral sclerosis, and including, but not limited to, progressive spinal muscular atrophy, progressive bulbar palsy, primary lateral sclerosis, infantile and juvenile muscular atrophy, progressive bulbar paralysis of childhood (Fazio-Londe syndrome), poliomyelitis and the post polio syndrome, and Hereditary Motorsensory Neuropathy (Charcot-Marie-Tooth Disease).

[0929] Further, fusion proteins of the invention and/or polynucleotides encoding albumin fusion proteins of the invention may play a role in neuronal survival; synapse formation; conductance; neural differentiation, etc. Thus, compositions of the invention (including fusion proteins of the invention and/or polynucleotides encoding albumin fusion proteins of the invention) may be used to diagnose and/or treat or prevent diseases or disorders associated with these roles, including, but not limited to, learning and/or cognition disorders. The compositions of the invention may also be useful in the treatment or prevention of neurodegenerative disease states and/or behavioural disorders. Such neurodegenerative disease states and/or behavioral disorders include, but are not limited to, Alzheimer's Disease, Parkinson's Disease, Huntington's Disease, Tourette Syndrome, schizophrenia, mania, dementia, paranoia, obsessive compulsive disorder, panic disorder, learning disabilities, ALS, psychoses, autism, and altered behaviors, including disorders in feeding, sleep patterns, balance, and perception. In addition, compositions of the invention may also play a role in the treatment, prevention and/or detection of developmental disorders associated with the developing embryo, or sexually-linked disorders.

[0930] Additionally, fusion proteins of the invention and/or polynucleotides encoding albumin fusion proteins of the invention, may be useful in protecting neural cells from diseases, damage, disorders, or injury, associated with cerebrovascular disorders including, but not limited to, carotid artery diseases (e.g., carotid artery thrombosis, carotid stenosis, or Moyamoya Disease), cerebral amyloid angiopathy, cerebral aneurysm, cerebral anoxia, cerebral arteriosclerosis, cerebral arteriovenous malformations, cerebral artery diseases, cerebral embolism and thrombosis (e.g., carotid artery thrombosis, sinus thrombosis, or Wallenberg's Syndrome), cerebral hemorrhage (e.g., epidural or subdural hematoma, or subarachnoid hemorrhage), cerebral infarction, cerebral ischemia (e.g., transient cerebral ischemia, Subclavian Steal Syndrome, or vertebrobasilar insufficiency), vascular dementia (e.g., multi-infarct), leukomalacia, periventricular, and vascular headache (e.g., cluster headache or migraines).

[0931] In accordance with yet a further aspect of the present invention, there is provided a process for utilizing fusion proteins of the invention and/or polynucleotides encoding albumin fusion proteins of the invention, for therapeutic purposes, for example, to stimulate neurological cell proliferation and/or differentiation. Therefore, fusion proteins of the invention and/or polynucleotides encoding albumin fusion proteins of the invention may be used to treat and/or detect neurologic diseases. Moreover, fusion proteins of the invention and/or polynucleotides encoding albumin fusion proteins of the invention, can be used as a marker or detector of a particular nervous system disease or disorder.

[0932] Examples of neurologic diseases which can be treated or detected with fusion proteins of the invention and/or polynucleotides encoding albumin fusion proteins of the invention include, brain diseases, such as metabolic brain diseases which includes phenylketonuria such as maternal phenylketonuria, pyruvate carboxylase deficiency, pyruvate dehydrogenase complex deficiency, Wernicke's Encephalopathy, brain edema, brain neoplasms such as cerebellar neoplasms which include infratentorial neoplasms, cerebral ventricle neoplasms such as choroid plexus neoplasms, hypothalamic neoplasms, supratentorial neoplasms, canavan disease, cerebellar diseases such as cerebellar ataxia which include spinocerebellar degeneration such as ataxia telangiectasia, cerebellar dyssynergia, Friederich's Ataxia, Machado-Joseph Disease, olivopontocerebellar atrophy, cerebellar neoplasms such as infratentorial neoplasms, diffuse cerebral sclerosis such as encephalitis periaxialis, globoid cell leukodystrophy, metachromatic leukodystrophy and subacute sclerosing panencephalitis.

[0933] Additional neurologic diseases which can be treated or detected with fusion proteins of the invention and/or polynucleotides encoding albumin fusion proteins of the invention include cerebrovascular disorders (such as carotid artery diseases which include carotid artery thrombosis, carotid stenosis and Moyamoya Disease), cerebral amyloid angiopathy, cerebral aneurysm, cerebral anoxia, cerebral arteriosclerosis, cerebral arteriovenous malformations, cerebral artery diseases, cerebral embolism and thrombosis such as carotid artery thrombosis, sinus thrombosis and Wallenberg's Syndrome, cerebral hemorrhage such as epidural hematoma, subdural hematoma and subarachnoid hemorrhage, cerebral infarction, cerebral ischemia such as transient cerebral ischemia, Subclavian Steal Syndrome and vertebrobasilar insufficiency, vascular dementia such as multi-infarct dementia, periventricular leukomalacia, vascular headache such as cluster headache and migraine.

[0934] Additional neurologic diseases which can be treated or detected with fusion proteins of the invention and/or polynucleotides encoding albumin fusion proteins of the invention include dementia such as AIDS Dementia Complex, presenile dementia such as Alzheimer's Disease and Creutzfeldt-Jakob Syndrome, senile dementia such as Alzheimer's Disease and progressive supranuclear palsy, vascular dementia such as multi-infarct dementia, encephalitis which include encephalitis periaxialis, viral encephalitis such as epidemic encephalitis, Japanese Encephalitis, St. Louis Encephalitis, tick-borne encephalitis and West Nile Fever, acute disseminated encephalomyelitis, meningoencephalitis such as uveomeningoencephalitic syndrome, Postencephalitic Parkinson Disease and subacute sclerosing panencephalitis, encephalomalacia such as periventricular leukomalacia, epilepsy such as generalized epilepsy which includes infantile spasms, absence epilepsy, myoclonic epilepsy which includes MERRF Syndrome, tonic-clonic epilepsy, partial epilepsy such as complex partial epilepsy, frontal lobe epilepsy and temporal lobe epilepsy, post-traumatic epilepsy, status epilepticus such as Epilepsia Partialis Continua, and Hallervorden-Spatz Syndrome.

[0935] Additional neurologic diseases which can be treated or detected with fusion proteins of the invention and/or polynucleotides encoding albumin fusion proteins of the invention include hydrocephalus such as Dandy-Walker Syndrome and normal pressure hydrocephalus, hypothalamic diseases such as hypothalamic neoplasms, cerebral malaria, narcolepsy which includes cataplexy, bulbar poliomyelitis, cerebri pseudotumor, Rett Syndrome, Reye's Syndrome, thalamic diseases, cerebral toxoplasmosis, intracranial tuberculoma and Zellweger Syndrome, central nervous system infections such as AIDS Dementia Complex, Brain Abscess, subdural empyema, encephalomyelitis such as Equine Encephalomyelitis, Venezuelan Equine Encephalomyelitis, Necrotizing Hemorrhagic Encephalomyelitis, Visna, and cerebral malaria.

[0936] Additional neurologic diseases which can be treated or detected with fusion proteins of the invention and/or polynucleotides encoding albumin fusion proteins of the invention include meningitis such as arachnoiditis, aseptic meningtitis such as viral meningtitis which includes lymphocytic choriomeningitis, Bacterial meningtitis which includes Haemophilus Meningtitis, Listeria Meningtitis, Meningococcal Meningtitis such as Waterhouse-Friderichsen Syndrome, Pneumococcal Meningtitis and meningeal tuberculosis, fungal meningitis such as Cryptococcal Meningtitis, subdural effusion, meningoencephalitis such as uvemeningoencephalitic syndrome, myelitis such as transverse myelitis, neurosyphilis such as tabes dorsalis, poliomyelitis which includes bulbar poliomyelitis and postpoliomyelitis syndrome, prion diseases (such as Creutzfeldt-Jakob Syndrome, Bovine Spongiform Encephalopathy, Gerstmann-Straussler Syndrome, Kuru, Scrapie), and cerebral toxoplasmosis.

[0937] Additional neurologic diseases which can be treated or detected with fusion proteins of the invention and/or polynucleotides encoding albumin fusion proteins of the invention include central nervous system neoplasms such as brain neoplasms that include cerebellar neoplasms such as infratentorial neoplasms, cerebral ventricle neoplasms such as choroid plexus neoplasms, hypothalamic neoplasms and supratentorial neoplasms, meningeal neoplasms, spinal cord neoplasms which include epidural neoplasms, demyelinating diseases such as Canavan Diseases, diffuse cerebral sceloris which includes adrenoleukodystrophy, encephalitis periaxialis, globoid cell leukodystrophy, diffuse cerebral sclerosis such as metachromatic leukodystrophy, allergic encephalomyelitis, necrotizing hemorrhagic encephalomyelitis, progressive multifocal leukoencephalopathy, multiple sclerosis, central pontine myelinolysis, transverse myelitis, neuromyelitis optica, Scrapie, Swayback, Chronic Fatigue Syndrome, Visna, High Pressure Nervous Syndrome, Meningism, spinal cord diseases such as amyotonia congenita, amyotrophic lateral sclerosis, spinal muscular atrophy such as Werdnig-Hoffmann Disease, spinal cord compression, spinal cord neoplasms such as epidural neoplasms, syringomyelia, Tabes Dorsalis, Stiff-Man Syndrome, mental retardation such as Angelman Syndrome, Cri-du-Chat Syndrome, De Lange's Syndrome, Down Syndrome, Gangliosidoses such as gangliosidoses G(M1), Sandhoff Disease, Tay-Sachs Disease, Hartnup Disease, homocystinuria, Laurence-Moon-Biedl Syndrome, Lesch-Nyhan Syndrome, Maple Syrup Urine Disease, mucolipidosis such as fucosidosis, neuronal ceroid-lipofuscinosis, oculocerebrorenal syndrome, phenylketonuria such as maternal phenylketonuria, Prader-Willi Syndrome, Rett Syndrome, Rubinstein-Taybi Syndrome, Tuberous Sclerosis, WAGR Syndrome, nervous system abnormalities such as holoprosencephaly, neural tube defects such as anencephaly which includes hydrangencephaly, Arnold-Chairi Deformity, encephalocele, meningocele, meningomyelocele, spinal dysraphism such as spina bifida cystica and spina bifida occulta.

[0938] Additional neurologic diseases which can be treated or detected with fusion proteins of the invention and/or polynucleotides encoding albumin fusion proteins of the invention include hereditary motor and sensory neuropathies which include Charcot-Marie Disease, Hereditary optic atrophy, Refsum's Disease, hereditary spastic paraplegia, Werdnig-Hoffmann Disease, Hereditary Sensory and Autonomic Neuropathies such as Congenital Analgesia and Familial Dysautonomia, Neurologic manifestations (such as agnosia that include Gerstmann's Syndrome, Amnesia such as retrograde amnesia, apraxia, neurogenic bladder, cataplexy, communicative disorders such as hearing disorders that includes deafness, partial hearing loss, loudness recruitment and tinnitus, language disorders such as aphasia which include agraphia, anomia, broca aphasia, and Wernicke Aphasia, Dyslexia such as Acquired Dyslexia, language development disorders, speech disorders such as aphasia which includes anomia, broca aphasia and Wernicke Aphasia, articulation disorders, communicative disorders such as speech disorders which include dysarthria, echolalia, mutism and stuttering, voice disorders such as aphonia and hoarseness, decerebrate state, delirium, fasciculation, hallucinations, meningism, movement disorders such as angelman syndrome, ataxia, athetosis, chorea, dystonia, hypokinesia, muscle hypotonia, myoclonus, tic, torticollis and tremor, muscle hypertonia such as muscle rigidity such as stiff-man syndrome, muscle spasticity, paralysis such as facial paralysis which includes Herpes Zoster Oticus, Gastroparesis, Hemiplegia, opthalmoplegia such as diplopia, Duane's Syndrome, Horner's Syndrome, Chronic progressive external opthalmoplegia such as Kearns Syndrome, Bulbar Paralysis, Tropical Spastic Paraparesis, Paraplegia such as Brown-Sequard Syndrome, quadriplegia, respiratory paralysis and vocal cord paralysis, paresis, phantom limb, taste disorders such as ageusia and dysgeusia, vision disorders such as amblyopia, blindness, color vision defects, diplopia, hemianopsia, scotoma and subnormal vision, sleep disorders such as hypersomnia which includes Kleine-Levin Syndrome, insomnia, and somnambulism, spasm such as trismus, unconsciousness such as coma, persistent vegetative state and syncope and vertigo, neuromuscular diseases such as amyotonia congenita, amyotrophic lateral sclerosis, Lambert-Eaton Myasthenic Syndrome, motor neuron disease, muscular atrophy such as spinal muscular atrophy, Charcot-Marie Disease and Werdnig-Hoffmann Disease, Postpoliomyelitis Syndrome, Muscular Dystrophy, Myasthenia Gravis, Myotonia Atrophica, Myotonia Confenita, Nemaline Myopathy, Familial Periodic Paralysis, Multiplex Paramyloclonus, Tropical Spastic Paraparesis and Stiff-Man Syndrome, peripheral nervous system diseases such as acrodynia, amyloid neuropathies, autonomic nervous system diseases such as Adie's Syndrome, Barre-Lieou Syndrome, Familial Dysautonomia, Horner's Syndrome, Reflex Sympathetic Dystrophy and Shy-Drager Syndrome, Cranial Nerve Diseases such as Acoustic Nerve Diseases such as Acoustic Neuroma which includes Neurofibromatosis 2, Facial Nerve Diseases such as Facial Neuralgia, Melkersson-Rosenthal Syndrome, ocular motility disorders which includes amblyopia, nystagmus, oculomotor nerve paralysis, opthalmoplegia such as Duane's Syndrome, Horner's Syndrome, Chronic Progressive External Opthalmoplegia which includes Kearns Syndrome, Strabismus such as Esotropia and Exotropia, Oculomotor Nerve Paralysis, Optic Nerve Diseases such as Optic Atrophy which includes Hereditary Optic Atrophy, Optic Disk Drusen, Optic Neuritis such as Neuromyelitis Optica, Papilledema, Trigeminal Neuralgia, Vocal Cord Paralysis, Demyelinating Diseases such as Neuromyelitis Optica and Swayback, and Diabetic neuropathies such as diabetic foot.

[0939] Additional neurologic diseases which can be treated or detected with fusion proteins of the invention and/or polynucleotides encoding albumin fusion proteins of the invention include nerve compression syndromes such as carpal tunnel syndrome, tarsal tunnel syndrome, thoracic outlet syndrome such as cervical rib syndrome, ulnar nerve compression syndrome, neuralgia such as causalgia, cervico-brachial neuralgia, facial neuralgia and trigeminal neuralgia, neuritis such as experimental allergic neuritis, optic neuritis, polyneuritis, polyradiculoneuritis and radiculities such as polyradiculitis, hereditary motor and sensory neuropathies such as Charcot-Marie Disease, Hereditary Optic Atrophy, Refsum's Disease, Hereditary Spastic Paraplegia and Werdnig-Hoffmann Disease, Hereditary Sensory and Autonomic Neuropathies which include Congenital Analgesia and Familial Dysautonomia, POEMS Syndrome, Sciatica, Gustatory Sweating and Tetany).

[0940] Endocrine Disorders

[0941] Albumin fusion proteins of the invention and/or polynucleotides encoding albumin fusion proteins of the invention, may be used to treat, prevent, diagnose, and/or prognose disorders and/or diseases related to hormone imbalance, and/or disorders or diseases of the endocrine system.

[0942] Hormones secreted by the glands of the endocrine system control physical growth, sexual function, metabolism, and other functions. Disorders may be classified in two ways: disturbances in the production of hormones, and the inability of tissues to respond to hormones. The etiology of these hormone imbalance or endocrine system diseases, disorders or conditions may be genetic, somatic, such as cancer and some autoimmune diseases, acquired (e.g., by chemotherapy, injury or toxins), or infectious. Moreover, fusion proteins of the invention and/or polynucleotides encoding albumin fusion proteins of the invention can be used as a marker or detector of a particular disease or disorder related to the endocrine system and/or hormone imbalance.

[0943] Endocrine system and/or hormone imbalance and/or diseases encompass disorders of uterine motility including, but not limited to: complications with pregnancy and labor (e.g., pre-term labor, post-term pregnancy, spontaneous abortion, and slow or stopped labor); and disorders and/or diseases of the menstrual cycle (e.g., dysmenorrhea and endometriosis).

[0944] Endocrine system and/or hormone imbalance disorders and/or diseases include disorders and/or diseases of the pancreas, such as, for example, diabetes mellitus, diabetes insipidus, congenital pancreatic agenesis, pheochromocytoma—islet cell tumor syndrome; disorders and/or diseases of the adrenal glands such as, for example, Addison's Disease, corticosteroid deficiency, virilizing disease, hirsutism, Cushing's Syndrome, hyperaldosteronism, pheochromocytoma; disorders and/or diseases of the pituitary gland, such as, for example, hyperpituitarism, hypopituitarism, pituitary dwarfism, pituitary adenoma, panhypopituitarism, acromegaly, gigantism; disorders and/or diseases of the thyroid, including but not limited to, hyperthyroidism, hypothyroidism, Plummer's disease, Graves' disease (toxic diffuse goiter), toxic nodular goiter, thyroiditis (Hashimoto's thyroiditis, subacute granulomatous thyroiditis, and silent lymphocytic thyroiditis), Pendred's syndrome, myxedema, cretinism, thyrotoxicosis, thyroid hormone coupling defect, thymic aplasia, Hurthle cell tumours of the thyroid, thyroid cancer, thyroid carcinoma, Medullary thyroid carcinoma; disorders and/or diseases of the parathyroid, such as, for example, hyperparathyroidism, hypoparathyroidism; disorders and/or diseases of the hypothalamus.

[0945] In addition, endocrine system and/or hormone imbalance disorders and/or diseases may also include disorders and/or diseases of the testes or ovaries, including cancer. Other disorders and/or diseases of the testes or ovaries further include, for example, ovarian cancer, polycystic ovary syndrome, Klinefelter's syndrome, vanishing testes syndrome (bilateral anorchia), congenital absence of Leydig's cells, cryptorchidism, Noonan's syndrome, myotonic dystrophy, capillary haemangioma of the testis (benign), neoplasias of the testis and neo-testis.

[0946] Moreover, endocrine system and/or hormone imbalance disorders and/or diseases may also include disorders and/or diseases such as, for example, polyglandular deficiency syndromes, pheochromocytoma, neuroblastoma, multiple Endocrine neoplasia, and disorders and/or cancers of endocrine tissues.

[0947] In another embodiment, albumin fusion proteins of the invention and/or polynucleotides encoding albumin fusion proteins of the invention, may be used to diagnose, prognose, prevent, and/or treat endocrine diseases and/or disorders associated with the tissue(s) in which the Therapeutic protein corresponding to the Therapeutic protein portion of the albumin protein of the invention is expressed,

[0948] Reproductive System Disorders

[0949] The albumin fusion proteins of the invention and/or polynucleotides encoding albumin fusion proteins of the invention may be used for the diagnosis, treatment, or prevention of diseases and/or disorders of the reproductive system. Reproductive system disorders that can be treated by the compositions of the invention, include, but are not limited to, reproductive system injuries, infections, neoplastic disorders, congenital defects, and diseases or disorders which result in infertility, complications with pregnancy, labor, or parturition, and postpartum difficulties.

[0950] Reproductive system disorders and/or diseases include diseases and/or disorders of the testes, including testicular atrophy, testicular feminization, cryptorchism (unilateral and bilateral), anorchia, ectopic testis, epididymitis and orchitis (typically resulting from infections such as, for example, gonorrhea, mumps, tuberculosis, and syphilis), testicular torsion, vasitis nodosa, germ cell tumors (e.g., seminomas, embryonal cell carcinomas, teratocarcinomas, choriocarcinomas, yolk sac tumors, and teratomas), stromal tumors (e.g., Leydig cell tumors), hydrocele, hematocele, varicocele, spermatocele, inguinal hernia, and disorders of sperm production (e.g., immotile cilia syndrome, aspermia, asthenozoospermia, azoospermia, oligospermia, and teratozoospermia).

[0951] Reproductive system disorders also include disorders of the prostate gland, such as acute non-bacterial prostatitis, chronic non-bacterial prostatitis, acute bacterial prostatitis, chronic bacterial prostatitis, prostatodystonia, prostatosis, granulomatous prostatitis, malacoplakia, benign prostatic hypertrophy or hyperplasia, and prostate neoplastic disorders, including adenocarcinomas, transitional cell carcinomas, ductal carcinomas, and squamous cell carcinomas.

[0952] Additionally, the compositions of the invention may be useful in the diagnosis, treatment, and/or prevention of disorders or diseases of the penis and urethra, including inflammatory disorders, such as balanoposthitis, balanitis xerotica obliterans, phimosis, paraphimosis, syphilis, herpes simplex virus, gonorrhea, non-gonococcal urethritis, chlamydia, mycoplasma, trichomonas, HIV, AIDS, Reiter's syndrome, condyloma acuminatum, condyloma latum, and pearly penile papules; urethral abnormalities, such as hypospadias, epispadias, and phimosis; premalignant lesions, including Erythroplasia of Queyrat, Bowen's disease, Bowenoid paplosis, giant condyloma of Buscke-Lowenstein, and varrucous carcinoma; penile cancers, including squamous cell carcinomas, carcinoma in situ, verrucous carcinoma, and disseminated penile carcinoma; urethral neoplastic disorders, including penile urethral carcinoma, bulbomembranous urethral carcinoma, and prostatic urethral carcinoma; and erectile disorders, such as priapism, Peyronie's disease, erectile dysfunction, and impotence.

[0953] Moreover, diseases and/or disorders of the vas deferens include vasculititis and CBAVD (congenital bilateral absence of the vas deferens); additionally, the albumin fusion proteins of the invention and/or polynucleotides encoding albumin fusion proteins of the invention may be used in the diagnosis, treatment, and/or prevention of diseases and/or disorders of the seminal vesicles, including hydatid disease, congenital chloride diarrhea, and polycystic kidney disease.

[0954] Other disorders and/or diseases of the male reproductive system include, for example, Klinefelter's syndrome, Young's syndrome, premature ejaculation, diabetes mellitus, cystic fibrosis, Kartagener's syndrome, high fever, multiple sclerosis, and gynecomastia.

[0955] Further, the polynucleotides, fusion proteins of the invention and/or polynucleotides encoding albumin fusion proteins of the invention may be used in the diagnosis, treatment, and/or prevention of diseases and/or disorders of the vagina and vulva, including bacterial vaginosis, candida vaginitis, herpes simplex virus, chancroid, granuloma inguinale, lymphogranuloma venereum, scabies, human papillomavirus, vaginal trauma, vulvar trauma, adenosis, chlamydia vaginitis, gonorrhea, trichomonas vaginitis, condyloma acuminatum, syphilis, molluscum contagiosum, atrophic vaginitis, Paget's disease, lichen sclerosus, lichen planus, vulvodynia, toxic shock syndrome, vaginismus, vulvovaginitis, vulvar vestibulitis, and neoplastic disorders, such as squamous cell hyperplasia, clear cell carcinoma, basal cell carcinoma, melanomas, cancer of Bartholin's gland, and vulvar intraepithelial neoplasia.

[0956] Disorders and/or diseases of the uterus include dysmenorrhea, retroverted uterus, endometriosis, fibroids, adenomyosis, anovulatory bleeding, amenorrhea, Cushing's syndrome, hydatidiform moles, Asherman's syndrome, premature menopause, precocious puberty, uterine polyps, dysfunctional uterine bleeding (e.g., due to aberrant hormonal signals), and neoplastic disorders, such as adenocarcinomas, keiomyosarcomas, and sarcomas. Additionally, the albumin fusion proteins of the invention and/or polynucleotides encoding albumin fusion proteins of the invention may be useful as a marker or detector of, as well as in the diagnosis, treatment, and/or prevention of congenital uterine abnormalities, such as bicornuate uterus, septate uterus, simple unicornuate uterus, unicornuate uterus with a noncavitary rudimentary horn, unicornuate uterus with a non-communicating cavitary rudimentary horn, unicornuate uterus with a communicating cavitary horn, arcuate uterus, uterine didelfus, and T-shaped uterus.

[0957] Ovarian diseases and/or disorders include anovulation, polycystic ovary syndrome (Stein-Leventhal syndrome), ovarian cysts, ovarian hypofunction, ovarian insensitivity to gonadotropins, ovarian overproduction of androgens, right ovarian vein syndrome, amenorrhea, hirutism, and ovarian cancer (including, but not limited to, primary and secondary cancerous growth, Sertoli-Leydig tumors, endometriod carcinoma of the ovary, ovarian papillary serous adenocarcinoma, ovarian mucinous adenocarcinoma, and Ovarian Krukenberg tumors).

[0958] Cervical diseases and/or disorders include cervicitis, chronic cervicitis, mucopurulent cervicitis, cervical dysplasia, cervical polyps, Nabothian cysts, cervical erosion, cervical incompetence, and cervical neoplasms (including, for example, cervical carcinoma, squamous metaplasia, squamous cell carcinoma, adenosquamous cell neoplasia, and columnar cell neoplasia).

[0959] Additionally, diseases and/or disorders of the reproductive system include disorders and/or diseases of pregnancy, including miscarriage and stillbirth, such as early abortion, late abortion, spontaneous abortion, induced abortion, therapeutic abortion, threatened abortion, missed abortion, incomplete abortion, complete abortion, habitual abortion, missed abortion, and septic abortion; ectopic pregnancy, anemia, Rh incompatibility, vaginal bleeding during pregnancy, gestational diabetes, intrauterine growth retardation, polyhydramnios, HELLP syndrome, abruptio placentae, placenta previa, hyperemesis, preeclampsia, eclampsia, herpes gestationis, and urticaria of pregnancy. Additionally, the albumin fusion proteins of the invention and/or polynucleotides encoding albumin fusion proteins of the invention may be used in the diagnosis, treatment, and/or prevention of diseases that can complicate pregnancy, including heart disease, heart failure, rheumatic heart disease, congenital heart disease, mitral valve prolapse, high blood pressure, anemia, kidney disease, infectious disease (e.g., rubella, cytomegalovirus, toxoplasmosis, infectious hepatitis, chlamydia, HIV, AIDS, and genital herpes), diabetes mellitus, Graves' disease, thyroiditis, hypothyroidism, Hashimoto's thyroiditis, chronic active hepatitis, cirrhosis of the liver, primary biliary cirrhosis, asthma, systemic lupus eryematosis, rheumatoid arthritis, myasthenia gravis, idiopathic thrombocytopenic purpura, appendicitis, ovarian cysts, gallbladder disorders, and obstruction of the intestine.

[0960] Complications associated with labor and parturition include premature rupture of the membranes, pre-term labor, post-term pregnancy, postmaturity, labor that progresses too slowly, fetal distress (e.g., abnormal heart rate (fetal or maternal), breathing problems, and abnormal fetal position), shoulder dystocia, prolapsed umbilical cord, amniotic fluid embolism, and aberrant uterine bleeding.

[0961] Further, diseases and/or disorders of the postdelivery period, including endometritis, myometritis, parametritis, peritonitis, pelvic thrombophlebitis, pulmonary embolism, endotoxemia, pyelonephritis, saphenous thrombophlebitis, mastitis, cystitis, postpartum hemorrhage, and inverted uterus.

[0962] Other disorders and/or diseases of the female reproductive system that may be diagnosed, treated, and/or prevented by the albumin fusion proteins of the invention and/or polynucleotides encoding albumin fusion proteins of the invention include, for example, Turner's syndrome, pseudohermaphroditism, premenstrual syndrome, pelvic inflammatory disease, pelvic congestion (vascular engorgement), frigidity, anorgasmia, dyspareunia, ruptured fallopian tube, and Mittelschmerz.

[0963] Infectious Disease

[0964] Albumin fusion proteins of the invention and/or polynucleotides encoding albumin fusion proteins of the invention can be used to treat or detect infectious agents. For example, by increasing the immune response, particularly increasing the proliferation and differentiation of B and/or T cells, infectious diseases may be treated. The immune response may be increased by either enhancing an existing immune response, or by initiating a new immune response. Alternatively, fusion proteins of the invention and/or polynucleotides encoding albumin fusion proteins of the invention may also directly inhibit the infectious agent, without necessarily eliciting an immune response.

[0965] Viruses are one example of an infectious agent that can cause disease or symptoms that can be treated or detected by albumin fusion proteins of the invention and/or polynucleotides encoding albumin fusion proteins of the invention. Examples of viruses, include, but are not limited to Examples of viruses, include, but are not limited to the following DNA and RNA viruses and viral families: Arbovirus, Adenoviridae, Arenaviridae, Arterivirus, Birnaviridae, Bunyaviridae, Caliciviridae, Circoviridae, Coronaviridae, Dengue, EBV, HIV, Flaviviridae, Hepadnaviridae (Hepatitis), Herpesviridae (such as, Cytomegalovirus, Herpes Simplex, Herpes Zoster), Mononegavirus (e.g., Paramyxoviridae, Morbillivirus, Rhabdoviridae), Orthomyxoviridae (e.g., Influenza A, Influenza B, and parainfluenza), papilloma virus, Papovaviridae, Parvoviridae, Picornaviridae, Poxyiridae (such as Smallpox or Vaccinia), Reoviridae (e.g., Rotavirus), Retroviridae (HTLV-I, HTLV-II, Lentivirus), and Togaviridae (e.g., Rubivirus). Viruses falling within these families can cause a variety of diseases or symptoms, including, but not limited to: arthritis, bronchiollitis, respiratory syncytial virus, encephalitis, eye infections (e.g., conjunctivitis, keratitis), chronic fatigue syndrome, hepatitis (A, B, C, E, Chronic Active, Delta), Japanese B encephalitis, Junin, Chikungunya, Rift Valley fever, yellow fever, meningitis, opportunistic infections (e.g., AIDS), pneumonia, Burkitt's Lymphoma, chickenpox, hemorrhagic fever, Measles, Mumps, Parainfluenza, Rabies, the common cold, Polio, leukemia, Rubella, sexually transmitted diseases, skin diseases (e.g., Kaposi's, warts), and viremia. Albumin fusion proteins of the invention and/or polynucleotides encoding albumin fusion proteins of the invention, can be used to treat or detect any of these symptoms or diseases. In specific embodiments, fusion proteins of the invention and/or polynucleotides encoding albumin fusion proteins of the invention are used to treat: meningitis, Dengue, EBV, and/or hepatitis (e.g., hepatitis B). In an additional specific embodiment fusion proteins of the invention and/or polynucleotides encoding albumin fusion proteins of the invention are used to treat patients nonresponsive to one or more other commercially available hepatitis vaccines. In a further specific embodiment fusion proteins of the invention and/or polynucleotides encoding albumin fusion proteins of the invention are used to treat AIDS.

[0966] Similarly, bacterial and fungal agents that can cause disease or symptoms and that can be treated or detected by albumin fusion proteins of the invention and/or polynucleotides encoding albumin fusion proteins of the invention include, but not limited to, the following Gram-Negative and Gram-positive bacteria, bacterial families, and fungi: Actinomyces (e.g., Norcardia), Acinetobacter, Cryptococcus neoformans, Aspergillus, Bacillaceae (e.g., Bacillus anthrasis), Bacteroides (e.g., Bacteroides fragilis), Blastomycosis, Bordetella, Borrelia (e.g., Borrelia burgdorferi), Brucella, Candidia, Campylobacter, Chlamydia, Clostridium (e.g., Clostridium botulinum, Clostridium dificile, Clostridium perfringens, Clostridium tetani), Coccidioides, Corynebacterium (e.g., Corynebacterium diptheriae), Cryptococcus, Dermatocycoses, E. coli (e.g., Enterotoxigenic E. coli and Enterohemorrhagic E. coli), Enterobacter (e.g. Enterobacter aerogenes), Enterobacteriaceae (Klebsiella, Salmonella (e.g., Salmonella typhi, Salmonella enteritidis, Salmonella typhi), Serratia, Yersinia, Shigella), Erysipelothrix, Haemophilus (e.g., Haemophilus influenza type B), Helicobacter, Legionella (e.g., Legionella pneumophila), Leptospira, Listeria (e.g., Listeria monocytogenes), Mycoplasma, Mycobacterium (e.g., Mycobacterium leprae and Mycobacterium tuberculosis), Vibrio (e.g., Vibrio cholerae), Neisseriaceae (e.g., Neisseria gonorrhea, Neisseria meningitidis), Pasteurellacea, Proteus, Pseudomonas (e.g., Pseudomonas aeruginosa), Rickettsiaceae, Spirochetes (e.g., Treponema spp., Leptospira spp., Borrelia spp.), Shigella spp., Staphylococcus (e.g., Staphylococcus aureus), Meningiococcus, Pneumococcus and Streptococcus (e.g., Streptococcus pneumoniae and Groups A, B, and C Streptococci), and Ureaplasmas. These bacterial, parasitic, and fungal families can cause diseases or symptoms, including, but not limited to: antibiotic-resistant infections, bacteremia, endocarditis, septicemia, eye infections (e.g., conjunctivitis), uveitis, tuberculosis, gingivitis, bacterial diarrhea, opportunistic infections (e.g., AIDS related infections), paronychia, prosthesis-related infections, dental caries, Reiter's Disease, respiratory tract infections, such as Whooping Cough or Empyema, sepsis, Lyme Disease, Cat-Scratch Disease, dysentery, paratyphoid fever, food poisoning, Legionella disease, chronic and acute inflammation, erythema, yeast infections, typhoid, pneumonia, gonorrhea, meningitis (e.g., mengitis types A and B), chlamydia, syphillis, diphtheria, leprosy, brucellosis, peptic ulcers, anthrax, spontaneous abortions, birth defects, pneumonia, lung infections, ear infections, deafness, blindness, lethargy, malaise, vomiting, chronic diarrhea, Crohn's disease, colitis, vaginosis, sterility, pelvic inflammatory diseases, candidiasis, paratuberculosis, tuberculosis, lupus, botulism, gangrene, tetanus, impetigo, Rheumatic Fever, Scarlet Fever, sexually transmitted diseases, skin diseases (e.g., cellulitis, dermatocycoses), toxemia, urinary tract infections, wound infections, nosocomial infections. Albumin fusion proteins of the invention and/or polynucleotides encoding albumin fusion proteins of the invention, can be used to treat or detect any of these symptoms or diseases. In specific embodiments, fusion proteins of the invention and/or polynucleotides encoding albumin fusion proteins of the invention are used to treat: tetanus, diptheria, botulism, and/or meningitis type B.

[0967] Moreover, parasitic agents causing disease or symptoms that can be treated, prevented, and/or diagnosed by fusion proteins of the invention and/or polynucleotides encoding albumin fusion proteins of the invention include, but not limited to, the following families or class: Amebiasis, Babesiosis, Coccidiosis, Cryptosporidiosis, Dientamoebiasis, Dourine, Ectoparasitic, Giardias, Helminthiasis, Leishmaniasis, Schistisoma, Theileriasis, Toxoplasmosis, Trypanosomiasis, and Trichomonas and Sporozoans (e.g., Plasmodium virax, Plasmodium falciparium, Plasmodium malariae and Plasmodium ovale). These parasites can cause a variety of diseases or symptoms, including, but not limited to: Scabies, Trombiculiasis, eye infections, intestinal disease (e.g., dysentery, giardiasis), liver disease, lung disease, opportunistic infections (e.g., AIDS related), malaria, pregnancy complications, and toxoplasmosis. Albumin fusion proteins of the invention and/or polynucleotides encoding albumin fusion proteins of the invention, can be used to treat, prevent, and/or diagnose any of these symptoms or diseases. In specific embodiments, fusion proteins of the invention and/or polynucleotides encoding albumin fusion proteins of the invention are used to treat, prevent, and/or diagnose malaria.

[0968] Albumin fusion proteins of the invention and/or polynucleotides encoding albumin fusion proteins of the invention could either be by administering an effective amount of an albumin fusion protein of the invention to the patient, or by removing cells from the patient, supplying the cells with a polynucleotide of the present invention, and returning the engineered cells to the patient (ex vivo therapy). Moreover, the albumin fusion proteins of the invention and/or polynucleotides encoding albumin fusion proteins of the invention can be used as an antigen in a vaccine to raise an immune response against infectious disease.

[0969] Regeneration

[0970] Albumin fusion proteins of the invention and/or polynucleotides encoding albumin fusion proteins of the invention can be used to differentiate, proliferate, and attract cells, leading to the regeneration of tissues. (See, Science 276:59-87 (1997)). The regeneration of tissues could be used to repair, replace, or protect tissue damaged by congenital defects, trauma (wounds, burns, incisions, or ulcers), age, disease (e.g. osteoporosis, osteocarthritis, periodontal disease, liver failure), surgery, including cosmetic plastic surgery, fibrosis, reperfusion injury, or systemic cytokine damage.

[0971] Tissues that could be regenerated using the present invention include organs (e.g., pancreas, liver, intestine, kidney, skin, endothelium), muscle (smooth, skeletal or cardiac), vasculature (including vascular and lymphatics), nervous, hematopoietic, and skeletal (bone, cartilage, tendon, and ligament) tissue. Preferably, regeneration occurs without or decreased scarring. Regeneration also may include angiogenesis.

[0972] Moreover, fusion proteins of the invention and/or polynucleotides encoding albumin fusion proteins of the invention, may increase regeneration of tissues difficult to heal. For example, increased tendon/ligament regeneration would quicken recovery time after damage. Albumin fusion proteins of the invention and/or polynucleotides encoding albumin fusion proteins of the invention could also be used prophylactically in an effort to avoid damage. Specific diseases that could be treated include of tendinitis, carpal tunnel syndrome, and other tendon or ligament defects. A further example of tissue regeneration of non-healing wounds includes pressure ulcers, ulcers associated with vascular insufficiency, surgical, and traumatic wounds.

[0973] Similarly, nerve and brain tissue could also be regenerated by using fusion proteins of the invention and/or polynucleotides encoding albumin fusion proteins of the invention, to proliferate and differentiate nerve, cells. Diseases that could be treated using this method include central and peripheral nervous system diseases, neuropathies, or mechanical and traumatic disorders (e.g., spinal cord disorders, head trauma, cerebrovascular disease, and stoke). Specifically, diseases associated with peripheral nerve injuries, peripheral neuropathy (e.g., resulting from chemotherapy or other medical therapies), localized neuropathies, and central nervous system diseases (e.g., Alzheimer's disease, Parkinson's disease, Huntington's disease, amyotrophic lateral sclerosis, and Shy-Drager syndrome), could all be treated using the albumin fusion proteins of the invention and/or polynucleotides encoding albumin fusion proteins of the invention.

[0974] Gastrointestinal Disorders

[0975] Albumin fusion proteins of the invention and/or polynucleotides encoding albumin fusion proteins of the invention, may be used to treat, prevent, diagnose, and/or prognose gastrointestinal disorders, including inflammatory diseases and/or conditions, infections, cancers (e.g., intestinal neoplasms (carcinoid tumor of the small intestine, non-Hodgkin's lymphoma of the small intestine, small bowl lymphoma)), and ulcers, such as peptic ulcers.

[0976] Gastrointestinal disorders include dysphagia, odynophagia, inflammation of the esophagus, peptic esophagitis, gastric reflux, submucosal fibrosis and stricturing, Mallory-Weiss lesions, leiomyomas, lipomas, epidermal cancers, adenocarcinomas, gastric retention disorders, gastroenteritis, gastric atrophy, gastric/stomach cancers, polyps of the stomach, autoimmune disorders such as pernicious anemia, pyloric stenosis, gastritis (bacterial, viral, eosinophilic, stress-induced, chronic erosive, atrophic, plasma cell, and Ménétrier's), and peritoneal diseases (e.g., chyloperioneum, hemoperitoneum, mesenteric cyst, mesenteric lymphadenitis, mesenteric vascular occlusion, panniculitis, neoplasms, peritonitis, pneumoperitoneum, bubphrenic abscess).

[0977] Gastrointestinal disorders also include disorders associated with the small intestine, such as malabsorption syndromes, distension, irritable bowel syndrome, sugar intolerance, celiac disease, duodenal ulcers, duodenitis, tropical sprue, Whipple's disease, intestinal lymphangiectasia, Crohn's disease, appendicitis, obstructions of the ileum, Meckel's diverticulum, multiple diverticula, failure of complete rotation of the small and large intestine, lymphoma, and bacterial and parasitic diseases (such as Traveler's diarrhea, typhoid and paratyphoid, cholera, infection by Roundworms (Ascariasis lumbricoides), Hookworms (Ancylostoma duodenale), Threadworms (Enterobius vennicularis), Tapeworms (Taenia saginata, Echinococcus granulosus, Diphyllobothrium spp., and T. solium).

[0978] Liver diseases and/or disorders include intrahepatic cholestasis (alagille syndrome, biliary liver cirrhosis), fatty liver (alcoholic fatty liver, reye syndrome), hepatic vein thrombosis, hepatolentricular degeneration, hepatomegaly, hepatopulmonary syndrome, hepatorenal syndrome, portal hypertension (esophageal and gastric varices), liver abscess (amebic liver abscess), liver cirrhosis (alcoholic, biliary and experimental), alcoholic liver diseases (fatty liver, hepatitis, cirrhosis), parasitic (hepatic echinococcosis, fascioliasis, amebic liver abscess), jaundice (hemolytic, hepatocellular, and cholestatic), cholestasis, portal hypertension, liver enlargement, ascites, hepatitis (alcoholic hepatitis, animal hepatitis, chronic hepatitis (autoimmune, hepatitis B, hepatitis C, hepatitis D, drug induced), toxic hepatitis, viral human hepatitis (hepatitis A, hepatitis B, hepatitis C, hepatitis D, hepatitis E), Wilson's disease, granulomatous hepatitis, secondary biliary cirrhosis, hepatic encephalopathy, portal hypertension, varices, hepatic encephalopathy, primary biliary cirrhosis, primary sclerosing cholangitis, hepatocellular adenoma, hemangiomas, bile stones, liver failure (hepatic encephalopathy, acute liver failure), and liver neoplasms (angiomyolipoma, calcified liver metastases, cystic liver metastases, epithelial tumors, fibrolamellar hepatocarcinoma, focal nodular hyperplasia, hepatic adenoma, hepatobiliary cystadenoma, hepatoblastoma, hepatocellular carcinoma, hepatoma, liver cancer, liver hemangioendothelioma, mesenchymal hamartoma, mesenchymal tumors of liver, nodular regenerative hyperplasia, benign liver tumors (Hepatic cysts [Simple cysts, Polycystic liver disease, Hepatobiliary cystadenoma, Choledochal cyst], Mesenchymal tumors [Mesenchymal hamartoma, Infantile hemangioendothelioma, Hemangioma, Peliosis hepatis, Lipomas, Inflammatory pseudotumor, Miscellaneous], Epithelial tumors [Bile duct epithelium (Bile duct hamartoma, Bile duct adenoma), Hepatocyte (Adenoma, Focal nodular hyperplasia, Nodular regenerative hyperplasia)], malignant liver tumors [hepatocellular, hepatoblastoma, hepatocellular carcinoma, cholangiocellular, cholangiocarcinoma, cystadenocarcinoma, tumors of blood vessels, angiosarcoma, Karposi's sarcoma, hemangioendothelioma, other tumors, embryonal sarcoma, fibrosarcoma, leiomyosarcoma, rhabdomyosarcoma, carcinosarcoma, teratoma, carcinoid, squamous carcinoma, primary lymphoma]), peliosis hepatis, erythrohepatic porphyria, hepatic porphyria (acute intermittent porphyria, porphyria cutanea tarda), Zellweger syndrome).

[0979] Pancreatic diseases and/or disorders include acute pancreatitis, chronic pancreatitis (acute necrotizing pancreatitis, alcoholic pancreatitis), neoplasms (adenocarcinoma of the pancreas, cystadenocarcinoma, insulinoma, gastrinoma, and glucagonoma, cystic neoplasms, islet-cell tumors, pancreoblastoma), and other pancreatic diseases (e.g., cystic fibrosis, cyst (pancreatic pseudocyst, pancreatic fistula, insufficiency)).

[0980] Gallbladder diseases include gallstones (cholelithiasis and choledocholithiasis), postcholecystectomy syndrome, diverticulosis of the gallbladder, acute cholecystitis, chronic cholecystitis, bile duct tumors, and mucocele.

[0981] Diseases and/or disorders of the large intestine include antibiotic-associated colitis, diverticulitis, ulcerative colitis, acquired megacolon, abscesses, fungal and bacterial infections, anorectal disorders (e.g., fissures, hemorrhoids), colonic diseases (colitis, colonic neoplasms [colon cancer, adenomatous colon polyps (e.g., villous adenoma), colon carcinoma, colorectal cancer], colonic diverticulitis, colonic diverticulosis, megacolon [Hirschsprung disease, toxic megacolon]; sigmoid diseases [proctocolitis, sigmoin neoplasms]), constipation, Crohn's disease, diarrhea (infantile diarrhea, dysentery), duodenal diseases (duodenal neoplasms, duodenal obstruction, duodenal ulcer, duodenitis), enteritis (enterocolitis), HIV enteropathy, ileal diseases (ileal neoplasms, ileitis), immunoproliferative small intestinal disease, inflammatory bowel disease (ulcerative colitis, Crohn's disease), intestinal atresia, parasitic diseases (anisakiasis, balantidiasis, blastocystis infections, cryptosporidiosis, dientamoebiasis, amebic dysentery, giardiasis), intestinal fistula (rectal fistula), intestinal neoplasms (cecal neoplasms, colonic neoplasms, duodenal neoplasms, ileal neoplasms, intestinal polyps, jejunal neoplasms, rectal neoplasms), intestinal obstruction (afferent loop syndrome, duodenal obstruction, impacted feces, intestinal pseudo-obstruction [cecal volvulus], intussusception), intestinal perforation, intestinal polyps (colonic polyps, gardner syndrome, peutz-jeghers syndrome), jejunal diseases (jejunal neoplasms), malabsorption syndromes (blind loop syndrome, celiac disease, lactose intolerance, short bowl syndrome, tropical sprue, whipple's disease), mesenteric vascular occlusion, pneumatosis cystoides intestinalis, protein-losing enteropathies (intestinal lymphagiectasis), rectal diseases (anus diseases, fecal incontinence, hemorrhoids, proctitis, rectal fistula, rectal prolapse, rectocele), peptic ulcer (duodenal ulcer, peptic esophagitis, hemorrhage, perforation, stomach ulcer, Zollinger-Ellison syndrome), postgastrectomy syndromes (dumping syndrome), stomach diseases (e.g., achlorhydria, duodenogastric reflux (bile reflux), gastric antral vascular ectasia, gastric fistula, gastric outlet obstruction, gastritis (atrophic or hypertrophic), gastroparesis, stomach dilatation, stomach diverticulum, stomach neoplasms (gastric cancer, gastric polyps, gastric adenocarcinoma, hyperplastic gastric polyp), stomach rupture, stomach ulcer, stomach volvulus), tuberculosis, visceroptosis, vomiting (e.g., hematemesis, hyperemesis gravidarum, postoperative nausea and vomiting) and hemorrhagic colitis.

[0982] Further diseases and/or disorders of the gastrointestinal system include biliary tract diseases, such as, gastroschisis, fistula (e.g., biliary fistula, esophageal fistula, gastric fistula, intestinal fistula, pancreatic fistula), neoplasms (e.g., biliary tract neoplasms, esophageal neoplasms, such as adenocarcinoma of the esophagus, esophageal squamous cell carcinoma, gastrointestinal neoplasms, pancreatic neoplasms, such as adenocarcinoma of the pancreas, mucinous cystic neoplasm of the pancreas, pancreatic cystic neoplasms, pancreatoblastoma, and peritoneal neoplasms), esophageal disease (e.g., bullous diseases, candidiasis, glycogenic acanthosis, ulceration, barrett esophagus varices, atresia, cyst, diverticulum (e.g., Zenker's diverticulum), fistula (e.g., tracheoesophageal fistula), motility disorders (e.g., CREST syndrome, deglutition disorders, achalasia, spasm, gastroesophageal reflux), neoplasms, perforation (e.g., Boerhaave syndrome, Mallory-Weiss syndrome), stenosis, esophagitis, diaphragmatic hernia (e.g., hiatal hernia); gastrointestinal diseases, such as, gastroenteritis (e.g., cholera morbus, norwalk virus infection), hemorrhage (e.g., hematemesis, melena, peptic ulcer hemorrhage), stomach neoplasms (gastric cancer, gastric polyps, gastric adenocarcinoma, stomach cancer)), hernia (e.g., congenital diaphragmatic hernia, femoral hernia, inguinal hernia, obturator hernia, umbilical hernia, ventral hernia), and intestinal diseases (e.g., cecal diseases (appendicitis, cecal neoplasms)).

[0983] Chemotaxis

[0984] Albumin fusion proteins of the invention and/or polynucleotides encoding albumin fusion proteins of the invention may have chemotaxis activity. A chemotaxic molecule attracts or mobilizes cells (e.g., monocytes, fibroblasts, neutrophils, T-cells, mast cells, eosinophils, epithelial and/or endothelial cells) to a particular site in the body, such as inflammation, infection, or site of hyperproliferation. The mobilized cells can then fight off and/or heal the particular trauma or abnormality.

[0985] Albumin fusion proteins of the invention and/or polynucleotides encoding albumin fusion proteins of the invention may increase chemotaxic activity of particular cells. These chemotactic molecules can then be used to treat inflammation, infection, hyperproliferative disorders, or any immune system disorder by increasing the number of cells targeted to a particular location in the body. For example, chemotaxic molecules can be used to treat wounds and other trauma to tissues by attracting immune cells to the injured location. Chemotactic molecules of the present invention can also attract fibroblasts, which can be used to treat wounds.

[0986] It is also contemplated that fusion proteins of the invention and/or polynucleotides encoding albumin fusion proteins of the invention may inhibit chemotactic activity. These molecules could also be used to treat disorders. Thus, fusion proteins of the invention and/or polynucleotides encoding albumin fusion proteins of the invention could be used as an inhibitor of chemotaxis.

[0987] Binding Activity

[0988] Albumin fusion proteins of the invention may be used to screen for molecules that bind to the Therapeutic protein portion of the fusion protein or for molecules to which the Therapeutic protein portion of the fusion protein binds. The binding of the fusion protein and the molecule may activate (agonist), increase, inhibit (antagonist), or decrease activity of the fusion protein or the molecule bound. Examples of such molecules include antibodies, oligonucleotides, proteins (e.g., receptors), or small molecules.

[0989] Preferably, the molecule is closely related to the natural ligand of the Therapeutic protein portion of the fusion protein of the invention, e.g., a fragment of the ligand, or a natural substrate, a ligand, a structural or functional mimetic. (See, Coligan et al., Current Protocols in Immunology 1(2):Chapter 5 (1991)). Similarly, the molecule can be closely related to the natural receptor to which the Therapeutic protein portion of an albumin fusion protein of the invention binds, or at least, a fragment of the receptor capable of being bound by the Therapeutic protein portion of an albumin fusion protein of the invention (e.g., active site). In either case, the molecule can be rationally designed using known techniques.

[0990] Preferably, the screening for these molecules involves producing appropriate cells which express the albumin fusion proteins of the invention. Preferred cells include cells from mammals, yeast, Drosophila, or E. coli.

[0991] The assay may simply test binding of a candidate compound to an albumin fusion protein of the invention, wherein binding is detected by a label, or in an assay involving competition with a labeled competitor. Further, the assay may test whether the candidate compound results in a signal generated by binding to the fusion protein.

[0992] Alternatively, the assay can be carried out using cell-free preparations, fusion protein/molecule affixed to a solid support, chemical libraries, or natural product mixtures. The assay may also simply comprise the steps of mixing a candidate compound with a solution containing an albumin fusion protein, measuring fusion protein/molecule activity or binding, and comparing the fusion protein/molecule activity or binding to a standard.

[0993] Preferably, an ELISA assay can measure fusion protein level or activity in a sample (e.g., biological sample) using a monoclonal or polyclonal antibody. The antibody can measure fusion protein level or activity by either binding, directly or indirectly, to the albumin fusion protein or by competing with the albumin fusion protein for a substrate.

[0994] Additionally, the receptor to which a Therapeutic protein portion of an albumin fusion protein of the invention binds can be identified by numerous methods known to those of skill in the art, for example, ligand panning and FACS sorting (Coligan, et al., Current Protocols in Imimun., 1(2), Chapter 5, (1991)). For example, in cases wherein the Therapeutic protein portion of the fusion protein corresponds to FGF, expression cloning may be employed wherein polyadenylated RNA is prepared from a cell responsive to the albumin fusion protein, for example, NIH3T3 cells which are known to contain multiple receptors for the FGF family proteins, and SC-3 cells, and a cDNA library created from this RNA is divided into pools and used to transfect COS cells or other cells that are not responsive to the albumin fusion protein. Transfected cells which are grown on glass slides are exposed to the albumin fusion protein of the present invention, after they have been labeled. The albumin fusion proteins can be labeled by a variety of means including iodination or inclusion of a recognition site for a site-specific protein kinase.

[0995] Following fixation and incubation, the slides are subjected to auto-radiographic analysis. Positive pools are identified and sub-pools are prepared and re-transfected using an iterative sub-pooling and re-screening process, eventually yielding a single clones that encodes the putative receptor.

[0996] As an alternative approach for receptor identification, a labeled albumin fusion protein can be photoaffinity linked with cell membrane or extract preparations that express the receptor molecule for the Therapeutic protein component of an albumin fusion protein of the invention, the linked material may be resolved by PAGE analysis and exposed to X-ray film. The labeled complex containing the receptors of the fusion protein can be excised, resolved into peptide fragments, and subjected to protein microsequencing. The amino acid sequence obtained from microsequencing would be used to design a set of degenerate oligonucleotide probes to screen a cDNA library to identify the genes encoding the putative receptors.

[0997] Moreover, the techniques of gene-shuffling, motif-shuffling, exon-shuffling, and/or codon-shuffling (collectively referred to as “DNA shuffling”) may be employed to modulate the activities of the fusion protein, and/or Therapeutic protein portion or albumin component of an albumin fusion protein of the present invention, thereby effectively generating agonists and antagonists of an albumin fusion protein of the present invention. See generally, U.S. Pat. Nos. 5,605,793, 5,811,238, 5,830,721, 5,834,252, and 5,837,458, and Patten, P. A., et al., Curr. Opinion Biotechnol. 8:724-33 (1997); Harayama, S. Trends Biotechnol. 16(2):76-82 (1998); Hansson, L. O., et al., J. Mol. Biol. 287:265-76 (1999); and Lorenzo, M. M. and Blasco, R. Biotechniques 24(2):308-13 (1998); each of these patents and publications are hereby incorporated by reference). In one embodiment, alteration of polynucleotides encoding albumin fusion proteins of the invention and thus, the albumin fusion proteins encoded thereby, may be achieved by DNA shuffling. DNA shuffling involves the assembly of two or more DNA segments into a desired molecule by homologous, or site-specific, recombination. In another embodiment, polynucleotides encoding albumin fusion proteins of the invention and thus, the albumin fusion proteins encoded thereby, may be altered by being subjected to random mutagenesis by error-prone PCR, random nucleotide insertion or other methods prior to recombination. In another embodiment, one or more components, motifs, sections, parts, domains, fragments, etc., of an albumin fusion protein of the present invention may be recombined with one or more components, motifs, sections, parts, domains, fragments, etc. of one or more heterologous molecules. In preferred embodiments, the heterologous molecules are family members. In further preferred embodiments, the heterologous molecule is a growth factor such as, for example, platelet-derived growth factor (PDGF), insulin-like growth factor (IGF-I), transforming growth factor (TGF)-alpha, epidermal growth factor (EGF), fibroblast growth factor (FGF), TGF-beta, bone morphogenetic protein (BMP)-2, BMP-4, BMP-5, BMP-6, BMP-7, activins A and B, decapentaplegic (dpp), 60A, OP-2, dorsalin, growth differentiation factors (GDFs), nodal, MIS, inhibin-alpha, TGF-beta1, TGF-beta2, TGF-beta3, TGF-beta5, and glial-derived neurotrophic factor (GDNF).

[0998] Other preferred fragments are biologically active fragments of the Therapeutic protein portion and/or albumin component of the albumin fusion proteins of the present invention. Biologically active fragments are those exhibiting activity similar, but not necessarily identical, to an activity of a Therapeutic protein portion and/or albumin component of the albumin fusion proteins of the present invention. The biological activity of the fragments may include an improved desired activity, or a decreased undesirable activity.

[0999] Additionally, this invention provides a method of screening compounds to identify those which modulate the action of an albumin fusion protein of the present invention. An example of such an assay comprises combining a mammalian fibroblast cell, an albumin fusion protein of the present invention, and the compound to be screened and ³[H]thymidine under cell culture conditions where the fibroblast cell would normally proliferate. A control assay may be performed in the absence of the compound to be screened and compared to the amount of fibroblast proliferation in the presence of the compound to determine if the compound stimulates proliferation by determining the uptake of ³[H] thymidine in each case. The amount of fibroblast cell proliferation is measured by liquid scintillation chromatography which measures the incorporation of ³[H] thymidine. Both agonist and antagonist compounds may be identified by this procedure.

[1000] In another method, a mammalian cell or membrane preparation expressing a receptor for the Therapeutic protein component of a fusion protein of the invention is incubated with a labeled fusion protein of the present invention in the presence of the compound. The ability of the compound to enhance or block this interaction could then be measured. Alternatively, the response of a known second messenger system following interaction of a compound to be screened and the receptor is measured and the ability of the compound to bind to the receptor and elicit a second messenger response is measured to determine if the compound is a potential fusion protein. Such second messenger systems include but are not limited to, cAMP guanylate cyclase, ion channels or phosphoinositide hydrolysis.

[1001] All of these above assays can be used as diagnostic or prognostic markers. The molecules discovered using these assays can be used to treat disease or to bring about a particular result in a patient (e.g., blood vessel growth) by activating or inhibiting the fusion protein/molecule. Moreover, the assays can discover agents which may inhibit or enhance the production of the albumin fusion proteins of the invention from suitably manipulated cells or tissues.

[1002] Therefore, the invention includes a method of identifying compounds which bind to an albumin fusion protein of the invention comprising the steps of: (a) incubating a candidate binding compound with an albumin fusion protein of the present invention; and (b) determining if binding has occurred. Moreover, the invention includes a method of identifying agonists/antagonists comprising the steps of: (a) incubating a candidate compound with an albumin fusion protein of the present invention, (b) assaying a biological activity, and (b) determining if a biological activity of the fusion protein has been altered.

[1003] Targeted Delivery

[1004] In another embodiment, the invention provides a method of delivering compositions to targeted cells expressing a receptor for a component of an albumin fusion protein of the invention.

[1005] As discussed herein, fusion proteins of the invention may be associated with heterologous polypeptides, heterologous nucleic acids, toxins, or prodrugs via hydrophobic, hydrophilic, ionic and/or covalent interactions. In one embodiment, the invention provides a method for the specific delivery of compositions of the invention to cells by administering fusion proteins of the invention (including antibodies) that are associated with heterologous polypeptides or nucleic acids. In one example, the invention provides a method for delivering a Therapeutic protein into the targeted cell. In another example, the invention provides a method for delivering a single stranded nucleic acid (e.g., antisense or ribozymes) or double stranded nucleic acid (e.g., DNA that can integrate into the cell's genome or replicate episomally and that can be transcribed) into the targeted cell.

[1006] In another embodiment, the invention provides a method for the specific destruction of cells (e.g., the destruction of tumor cells) by administering an albumin fusion protein of the invention (e.g., polypeptides of the invention or antibodies of the invention) in association with toxins or cytotoxic prodrugs.

[1007] By “toxin” is meant compounds that bind and activate endogenous cytotoxic effector systems, radioisotopes, holotoxins, modified toxins, catalytic subunits of toxins, or any molecules or enzymes not normally present in or on the surface of a cell that under defined conditions cause the cell's death. Toxins that may be used according to the methods of the invention include, but are not limited to, radioisotopes known in the art, compounds such as, for example, antibodies (or complement fixing containing portions thereof) that bind an inherent or induced endogenous cytotoxic effector system, thymidine kinase, endonuclease, RNAse, alpha toxin, ricin, abrin, Pseudomonas exotoxin A, diphtheria toxin, saporin, momordin, gelonin, pokeweed antiviral protein, alpha-sarcin and cholera toxin. By “cytotoxic prodrug” is meant a non-toxic compound that is converted by an enzyme, normally present in the cell, into a cytotoxic compound. Cytotoxic prodrugs that may be used according to the methods of the invention include, but are not limited to, glutamyl derivatives of benzoic acid mustard alkylating agent, phosphate derivatives of etoposide or mitomycin C, cytosine arabinoside, daunorubisin, and phenoxyacetamide derivatives of doxorubicin.

[1008] Drug Screening

[1009] Further contemplated is the use of the albumin fusion proteins of the present invention, or the polynucleotides encoding these fusion proteins, to screen for molecules which modify the activities of the albumin fusion protein of the present invention or proteins corresponding to the Therapeutic protein portion of the albumin fusion protein. Such a method would include contacting the fusion protein with a selected compound(s) suspected of having antagonist or agonist activity, and assaying the activity of the fusion protein following binding.

[1010] This invention is particularly useful for screening therapeutic compounds by using the albumin fusion proteins of the present invention, or binding fragments thereof, in any of a variety of drug screening techniques. The albumin fusion protein employed in such a test may be affixed to a solid support, expressed on a cell surface, free in solution, or located intracellularly. One method of drug screening utilizes eukaryotic or prokaryotic host cells which are stably transformed with recombinant nucleic acids expressing the albumin fusion protein. Drugs are screened against such transformed cells or supernatants obtained from culturing such cells, in competitive binding assays. One may measure, for example, the formulation of complexes between the agent being tested and an albumin fusion protein of the present invention.

[1011] Thus, the present invention provides methods of screening for drugs or any other agents which affect activities mediated by the albumin fusion proteins of the present invention. These methods comprise contacting such an agent with an albumin fusion protein of the present invention or a fragment thereof and assaying for the presence of a complex between the agent and the albumin fusion protein or a fragment thereof, by methods well known in the art. In such a competitive binding assay, the agents to screen are typically labeled. Following incubation, free agent is separated from that present in bound form, and the amount of free or uncomplexed label is a measure of the ability of a particular agent to bind to the albumin fusion protein of the present invention.

[1012] Another technique for drug screening provides high throughput screening for compounds having suitable binding affinity to an albumin fusion protein of the present invention, and is described in great detail in European Patent Application 84/03564, published on Sep. 13, 1984, which is incorporated herein by reference herein. Briefly stated, large numbers of different small peptide test compounds are synthesized on a solid substrate, such as plastic pins or some other surface. The peptide test compounds are reacted with an albumin fusion protein of the present invention and washed. Bound peptides are then detected by methods well known in the art. Purified albumin fusion protein may be coated directly onto plates for use in the aforementioned drug screening techniques. In addition, non-neutralizing antibodies may be used to capture the peptide and immobilize it on the solid support.

[1013] This invention also contemplates the use of competitive drug screening assays in which neutralizing antibodies capable of binding an albumin fusion protein of the present invention specifically compete with a test compound for binding to the albumin fusion protein or fragments thereof. In this manner, the antibodies are used to detect the presence of any peptide which shares one or more antigenic epitopes with an albumin fusion protein of the invention.

[1014] Binding Peptides and Other Molecules

[1015] The invention also encompasses screening methods for identifying polypeptides and nonpolypeptides that bind albumin fusion proteins of the invention, and the binding molecules identified thereby. These binding molecules are useful, for example, as agonists and antagonists of the albumin fusion proteins of the invention. Such agonists and antagonists can be used, in accordance with the invention, in the therapeutic embodiments described in detail, below.

[1016] This method comprises the steps of: contacting an albumin fusion protein of the invention with a plurality of molecules; and identifying a molecule that binds the albumin fusion protein.

[1017] The step of contacting the albumin fusion protein of the invention with the plurality of molecules may be effected in a number of ways. For example, one may contemplate immobilizing the albumin fusion protein on a solid support and bringing a solution of the plurality of molecules in contact with the immobilized polypeptides. Such a procedure would be akin to an affinity chromatographic process, with the affinity matrix being comprised of the immobilized albumin fusion protein of the invention. The molecules having a selective affinity for the albumin fusion protein can then be purified by affinity selection. The nature of the solid support, process for attachment of the albumin fusion protein to the solid support, solvent, and conditions of the affinity isolation or selection are largely conventional and well known to those of ordinary skill in the art.

[1018] Alternatively, one may also separate a plurality of polypeptides into substantially separate fractions comprising a subset of or individual polypeptides. For instance, one can separate the plurality of polypeptides by gel electrophoresis, column chromatography, or like method known to those of ordinary skill for the separation of polypeptides. The individual polypeptides can also be produced by a transformed host cell in such a way as to be expressed on or about its outer surface (e.g., a recombinant phage). Individual isolates can then be “probed” by an albumin fusion protein of the invention, optionally in the presence of an inducer should one be required for expression, to determine if any selective affinity interaction takes place between the albumin fusion protein and the individual clone. Prior to contacting the albumin fusion protein with each fraction comprising individual polypeptides, the polypeptides could first be transferred to a solid support for additional convenience. Such a solid support may simply be a piece of filter membrane, such as one made of nitrocellulose or nylon. In this manner, positive clones could be identified from a collection of transformed host cells of an expression library, which harbor a DNA construct encoding a polypeptide having a selective affinity for an albumin fusion protein of the invention. Furthermore, the amino acid sequence of the polypeptide having a selective affinity for an albumin fusion protein of the invention can be determined directly by conventional means or the coding sequence of the DNA encoding the polypeptide can frequently be determined more conveniently. The primary sequence can then be deduced from the corresponding DNA sequence. If the amino acid sequence is to be determined from the polypeptide itself, one may use microsequencing techniques. The sequencing technique may include mass spectroscopy.

[1019] In certain situations, it may be desirable to wash away any unbound polypeptides from a mixture of an albumin fusion protein of the invention and the plurality of polypeptides prior to attempting to determine or to detect the presence of a selective affinity interaction. Such a wash step may be particularly desirable when the albumin fusion protein of the invention or the plurality of polypeptides are bound to a solid support.

[1020] The plurality of molecules provided according to this method may be provided by way of diversity libraries, such as random or combinatorial peptide or nonpeptide libraries which can be screened for molecules that specifically bind an albumin fusion protein of the invention. Many libraries are known in the art that can be used, e.g., chemically synthesized libraries, recombinant (e.g., phage display libraries), and in vitro translation-based libraries. Examples of chemically synthesized libraries are described in Fodor et al., Science 251:767-773 (1991); Houghten et al., Nature 354:84-86 (1991); Lam et al., Nature 354:82-84 (1991); Medynski, Bio/Technology 12:709-710 (1994); Gallop et al., J. Medicinal Chemistry 37(9):1233-1251 (1994); Ohlmeyer et al., Proc. Natl. Acad. Sci. USA 90:10922-10926 (1993); Erb et al., Proc. Natl. Acad. Sci. USA 91:11422-11426 (1994); Houghten et al., Biotechniques 13:412 (1992); Jayawickreme et al., Proc. Natl. Acad. Sci. USA 91:1614-1618 (1994); Salmon et al., Proc. Natl. Acad. Sci. USA 90:11708-11712 (1993); PCT Publication No. WO 93/20242; and Brenner and Lerner, Proc. Natl. Acad. Sci. USA 89:5381-5383 (1992).

[1021] Examples of phage display libraries are described in Scott et al., Science 249:386-390 (1990); Devlin et al., Science, 249:404-406 (1990); Christian et al., 1992, J. Mol. Biol. 227:711-718 1992); Lenstra, J. Immunol. Meth. 152:149-157 (1992); Kay et al., Gene 128:59-65 (1993); and PCT Publication No. WO 94/18318 dated Aug. 18, 1994.

[1022] In vitro translation-based libraries include but are not limited to those described in PCT Publication No. WO 91/05058 dated Apr. 18, 1991; and Mattheakis et al., Proc. Natl. Acad. Sci. USA 91:9022-9026 (1994).

[1023] By way of examples of nonpeptide libraries, a benzodiazepine library (see e.g., Bunin et al., Proc. Natl. Acad. Sci. USA 91:4708-4712 (1994)) can be adapted for use. Peptoid libraries (Simon et al., Proc. Natl. Acad. Sci. USA 89:9367-9371 (1992)) can also be used. Another example of a library that can be used, in which the amide functionalities in peptides have been permethylated to generate a chemically transformed combinatorial library, is described by Ostresh et al. (Proc. Natl. Acad. Sci. USA 91:11138-11142 (1994)).

[1024] The variety of non-peptide libraries that are useful in the present invention is great. For example, Ecker and Crooke (Bio/Technology 13:351-360 (1995) list benzodiazepines, hydantoins, piperazinediones, biphenyls, sugar analogs, beta-mercaptoketones, arylacetic acids, acylpiperidines, benzopyrans, cubanes, xanthines, aminimides, and oxazolones as among the chemical species that form the basis of various libraries.

[1025] Non-peptide libraries can be classified broadly into two types: decorated monomers and oligomers. Decorated monomer libraries employ a relatively simple scaffold structure upon which a variety functional groups is added. Often the scaffold will be a molecule with a known useful pharmacological activity. For example, the scaffold might be the benzodiazepine structure.

[1026] Non-peptide oligomer libraries utilize a large number of monomers that are assembled together in ways that create new shapes that depend on the order of the monomers. Among the monomer units that have been used are carbamates, pyrrolinones, and morpholinos. Peptoids, peptide-like oligomers in which the side chain is attached to the alpha amino group rather than the alpha carbon, form the basis of another version of non-peptide oligomer libraries. The first non-peptide oligomer libraries utilized a single type of monomer and thus contained a repeating backbone. Recent libraries have utilized more than one monomer, giving the libraries added flexibility.

[1027] Screening the libraries can be accomplished by any of a variety of commonly known methods. See, e.g., the following references, which disclose screening of peptide libraries: Parmley et al., Adv. Exp. Med. Biol. 251:215-218 (1989); Scott et al., Science 249:386-390 (1990); Fowlkes et al., BioTechniques 13:422-427 (1992); Oldenburg et al., Proc. Natl. Acad. Sci. USA 89:5393-5397 (1992); Yu et al., Cell 76:933-945 (1994); Staudt et al., Science 241:577-580 (1988); Bock et al., Nature 355:564-566 (1992); Tuerk et al., Proc. Natl. Acad. Sci. USA 89:6988-6992 (1992); Ellington et al., Nature 355:850-852 (1992); U.S. Pat. No. 5,096,815, U.S. Pat. No. 5,223,409, and U.S. Pat. No. 5,198,346, all to Ladner et al.; Rebar et al., Science 263:671-673 (1993); and PCT Publication No. WO 94/18318.

[1028] In a specific embodiment, screening to identify a molecule that binds an albumin fusion protein of the invention can be carried out by contacting the library members with an albumin fusion protein of the invention immobilized on a solid phase and harvesting those library members that bind to the albumin fusion protein. Examples of such screening methods, termed “panning” techniques are described by way of example in Parmley et al., Gene 73:305-318 (1988); Fowlkes et al., BioTechniques 13:422-427 (1992); PCT Publication No. WO 94/18318; and in references cited herein.

[1029] In another embodiment, the two-hybrid system for selecting interacting proteins in yeast (Fields et al., Nature 340:245-246 (1989); Chien et al., Proc. Natl. Acad. Sci. USA 88:9578-9582 (1991) can be used to identify molecules that specifically bind to polypeptides of the invention.

[1030] Where the binding molecule is a polypeptide, the polypeptide can be conveniently selected from any peptide library, including random peptide libraries, combinatorial peptide libraries, or biased peptide libraries. The term “biased” is used herein to mean that the method of generating the library is manipulated so as to restrict one or more parameters that govern the diversity of the resulting collection of molecules, in this case peptides.

[1031] Thus, a truly random peptide library would generate a collection of peptides in which the probability of finding a particular amino acid at a given position of the peptide is the same for all 20 amino acids. A bias can be introduced into the library, however, by specifying, for example, that a lysine occur every fifth amino acid or that positions 4, 8, and 9 of a decapeptide library be fixed to include only arginine. Clearly, many types of biases can be contemplated, and the present invention is not restricted to any particular bias. Furthermore, the present invention contemplates specific types of peptide libraries, such as phage displayed peptide libraries and those that utilize a DNA construct comprising a lambda phage vector with a DNA insert.

[1032] As mentioned above, in the case of a binding molecule that is a polypeptide, the polypeptide may have about 6 to less than about 60 amino acid residues, preferably about 6 to about 10 amino acid residues, and most preferably, about 6 to about 22 amino acids. In another embodiment, a binding polypeptide has in the range of 15-100 amino acids, or 20-50 amino acids.

[1033] The selected binding polypeptide can be obtained by chemical synthesis or recombinant expression.

[1034] Other Activities

[1035] An albumin fusion protein of the invention and/or polynucleotide encoding an albumin fusion protein of the invention, may be employed in treatment for stimulating re-vascularization of ischemic tissues due to various disease conditions such as thrombosis, arteriosclerosis, and other cardiovascular conditions. The albumin fusion proteins of the invention and/or polynucleotides encoding albumin fusion proteins of the invention may also be employed to stimulate angiogenesis and limb regeneration, as discussed above.

[1036] An albumin fusion protein of the invention and/or polynucleotide encoding an albumin fusion protein of the invention may also be employed for treating wounds due to injuries, burns, post-operative tissue repair, and ulcers since they are mitogenic to various cells of different origins, such as fibroblast cells and skeletal muscle cells, and therefore, facilitate the repair or replacement of damaged or diseased tissue.

[1037] An albumin fusion protein of the invention and/or polynucleotide encoding an albumin fusion protein of the invention may also be employed stimulate neuronal growth and to treat and prevent neuronal damage which occurs in certain neuronal disorders or neuro-degenerative conditions such as Alzheimer's disease, Parkinson's disease, and AIDS-related complex. An albumin fusion protein of the invention and/or polynucleotide encoding an albumin fusion protein of the invention may have the ability to stimulate chondrocyte growth, therefore, they may be employed to enhance bone and periodontal regeneration and aid in tissue transplants or bone grafts.

[1038] An albumin fusion protein of the invention and/or polynucleotide encoding an albumin fusion protein of the invention may be also be employed to prevent skin aging due to sunburn by stimulating keratinocyte growth.

[1039] An albumin fusion protein of the invention and/or polynucleotide encoding an albumin fusion protein of the invention may also be employed for preventing hair loss. Along the same lines, an albumin fusion protein of the invention and/or polynucleotide encoding an albumin fusion protein of the invention may be employed to stimulate growth and differentiation of hematopoietic cells and bone marrow cells when used in combination with other cytokines.

[1040] An albumin fusion protein of the invention and/or polynucleotide encoding an albumin fusion protein of the invention may also be employed to maintain organs before transplantation or for supporting cell culture of primary tissues. An albumin fusion protein of the invention and/or polynucleotide encoding an albumin fusion protein of the invention may also be employed for inducing tissue of mesodermal origin to differentiate in early embryos.

[1041] An albumin fusion protein of the invention and/or polynucleotide encoding an albumin fusion protein of the invention may also increase or decrease the differentiation or proliferation of embryonic stem cells, besides, as discussed above, hematopoietic lineage.

[1042] An albumin fusion protein of the invention and/or polynucleotide encoding an albumin fusion protein of the invention may also be used to modulate mammalian characteristics, such as body height, weight, hair color, eye color, skin, percentage of adipose tissue, pigmentation, size, and shape (e.g., cosmetic surgery). Similarly, an albumin fusion protein of the invention and/or polynucleotide encoding an albumin fusion protein of the invention may be used to modulate mammalian metabolism affecting catabolism, anabolism, processing, utilization, and storage of energy.

[1043] An albumin fusion protein of the invention and/or polynucleotide encoding an albumin fusion protein of the invention may be used to change a mammal's mental state or physical state by influencing biorhythms, caricadic rhythms, depression (including depressive disorders), tendency for violence, tolerance for pain, reproductive capabilities (preferably by Activin or Inhibin-like activity), hormonal or endocrine levels, appetite, libido, memory, stress, or other cognitive qualities.

[1044] An albumin fusion protein of the invention and/or polynucleotide encoding an albumin fusion protein of the invention may also be used as a food additive or preservative, such as to increase or decrease storage capabilities, fat content, lipid, protein, carbohydrate, vitamins, minerals, cofactors or other nutritional components.

[1045] The above-recited applications have uses in a wide variety of hosts. Such hosts include, but are not limited to, human, murine, rabbit, goat, guinea pig, camel, horse, mouse, rat, hamster, pig, micro-pig, chicken, goat, cow, sheep, dog, cat, non-human primate, and human. In specific embodiments, the host is a mouse, rabbit, goat, guinea pig, chicken, rat, hamster, pig, sheep, dog or cat. In preferred embodiments, the host is a mammal. In most preferred embodiments, the host is a human.

[1046] Having generally described the invention, the same will be more readily understood by reference to the following examples, which are provided by way of illustration and are not intended as limiting.

[1047] Without further description, it is believed that one of ordinary skill in the art can, using the preceding description and the following illustrative examples, make and utilize the alterations detected in the present invention and practice the claimed methods. The following working examples therefore, specifically point out preferred embodiments of the present invention, and are not to be construed as limiting in any way the remainder of the disclosure.

### EXAMPLES

### Example 1

### Generation of pScNHSA and pScCHSA

[1048] The vectors pScNHSA (ATCC Deposit No. PTA-3279) and pScCHSA (ATCC Deposit No. PTA-3276) are derivatives of pPPC0005 (ATCC Deposit No. PTA-3278) and are used as cloning vectors into which polynucleotides encoding a therapeutic protein or fragment or variant thereof is inserted adjacent to and in translation frame with polynucleotides encoding human serum albumin “HSA”. pScCHSA may be used for generating Therapeutic protein-HSA fusions, while pScNHSA may be used to generate HSA-Therapeutic protein fusions.

[1049] Generation of pScCHSA: Albumin Fusion with the Albumin Moiety C-Terminal to the Therapeutic Portion.

[1050] A vector to facilitate cloning DNA encoding a Therapeutic protein N-terminal to DNA encoding the mature albumin protein was made by altering the nucleic acid sequence that encodes the chimeric HSA signal peptide in pPPC0005 to include the Xho I and Cla I restriction sites.

[1051] First, the Xho I and Cla I sites inherent to pPPC0005 (located 3′ of the ADH1 terminator sequence) were eliminated by digesting pPPC0005 with Xho I and Cla I, filling in the sticky ends with T4 DNA polymerase, and relegating the blunt ends to create pPPC0006.

[1052] Second, the Xho I and Cla I restriction sites were engineered into the nucleic acid sequence that encodes the signal peptide of HSA (a chimera of the HSA leader and a kex2 site from mating factor alpha, “MAF”) in pPPC0006 using two rounds of PCR. In the first round of PCR, amplification with primers shown as SEQ ID NO:36 and SEQ ID NO:37 was performed. The primer whose sequence is shown as SEQ ID NO:36 comprises a nucleic acid sequence that encodes part of the signal peptide sequence of HSA, a kex2 site from the mating factor alpha leader sequence, and part of the amino-terminus of the mature form of HSA. Four point mutations were introduced in the sequence, creating the Xho I and Cla I sites found at the junction of the chimeric signal peptide and the mature form of HSA. These four mutations are underlined in the sequence shown below. In pPPC0005 the nucleotides at these four positions from 5′ to 3′ are T, G, T, and G. 5′-GCCTCGAGAAAAGAGATGCACACAAGAGTGAGGTTGCTCATCGATTTAAAGATTT GGG-3′ (SEQ ID NO:36) and 5′-AATCGATGAGCAACCTCACTCTTGTGTGCATCTCTTTTCTCGAGGCTCCTGGAATA AGC-3′ (SEQ ID NO:37). A second round of PCR was then performed with an upstream flanking primer, 5′-TACAAACTTAAGAGTCCAATTAGC-3′ (SEQ ID NO:38) and a downstream flanking primer 5′-CACTTCTCTAGAGTGGTTTCATATGTCTT-3′ (SEQ ID NO:39). The resulting PCR product was then purified and digested with Afl II and Xba I and ligated into the same sites in pPPC0006 creating pScCHSA. The resulting plasmid has Xho I and Cla I sites engineered into the signal sequence. The presence of the Xho I site creates a single amino acid change in the end of the signal sequence from LDKR to LEKR. The D to E change will not be present in the final albumin fusion protein expression plasmid when a nucleic acid sequence comprising a polynucleotide encoding the Therapeutic portion of the albumin fusion protein with a 5′ Sal I site (which is compatible with the Xho I site) and a 3′ Cla I site is ligated into the Xho I and Cla I sites of pScCHSA. Ligation of Sal I to Xho I restores the original amino acid sequence of the signal peptide sequence. DNA encoding the Therapeutic portion of the albumin fusion protein may be inserted after the Kex2 site (Kex2 cleaves after the dibasic amino acid sequence KR at the end of the signal peptide) and prior to the Cla I site.

[1053] Generation of pScNHSA: Albumin Fusion with the Albumin Moiety N-Terminal to the Therapeutic Portion.

[1054] A vector to facilitate cloning DNA encoding a Therapeutic protein portion C-terminal to DNA encoding the mature albumin protein, was made by adding three, eight-base-pair restriction sites to pScCHSA. The Asc I, Fse I, and Pme I restriction sites were added in between the Bsu36 I and Hind III sites at the end of the nucleic acid sequence encoding the mature HSA protein. This was accomplished through the use of two complementary synthetic primers containing the Asc I, Fse I, and Pme I restriction sites underlined (SEQ ID NO:40 and SEQ ID NO:41). 5′-AAGCTGCCTTAGGCTTATAATAAGGCGCGCCGGCCGGCCGTTTAAACTAAGCTTA ATTCT-3′ (SEQ ID NO:40) and 5-AGAATTAAGCTTAGTTTAAACGGCCGGCCGGCGCGCCTTATTATAAGCCTAAGGCA GCTT-3′ (SEQ ID NO:41). These primers were annealed and digested with Bsu36 I and Hind III and ligated into the same sites in pScCHSA creating pScNHSA.

### Example 2

### General Construct Generation for Yeast Transformation

[1055] The vectors pScNHSA and pScCHSA may be used as cloning vectors into which polynucleotides encoding a therapeutic protein or fragment or variant thereof is inserted adjacent to polynucleotides encoding mature human serum albumin “HSA”. pScCHSA is used for generating Therapeutic protein-HSA fusions, while pScNHSA may be used to generate HSA-Therapeutic protein fusions.

[1056] Generation of Albumin Fusion Constructs Comprising HSA-Therapeutic Protein Fusion Products.

[1057] DNA encoding a Therapeutic protein (e.g., sequences shown in SEQ ID NO:X or known in the art) may be PCR amplified using the primers which facilitate the generation of a fusion construct (e.g., by adding restriction sites, encoding seamless fusions, encoding linker sequences, etc.) For example, one skilled in the art could design a 5′ primer that adds polynucleotides encoding the last four amino acids of the mature form of HSA (and containing the Bsu36I site) onto the 5′ end of DNA encoding a Therapeutic protein; and a 3′ primer that adds a STOP codon and appropriate cloning sites onto the 3′ end of the Therapeutic protein coding sequence. For instance, the forward primer used to amplify DNA encoding a Therapeutic protein might have the sequence, 5′-aagctGCCTTAGGCTTA(N)₁₅-3′ (SEQ ID NO:42) where the underlined sequence is a Bsu36I site, the upper case nucleotides encode the last four amino acids of the mature HSA protein (ALGL), and (N)₁₅ is identical to the first 15 nucleotides encoding the Therapeutic protein of interest. Similarly, the reverse primer used to amplify DNA encoding a Therapeutic protein might have the sequence, 5′-GCGCGCGTTTAAACGGCCGGCCGGCGCGCCTTATTA

[1058] (N)₁₅-3′ (SEQ ID NO:43) where the italicized sequence is a Pme I site, the double underlined sequence is an Fse I site, the singly underlined sequence is an Asc I site, the boxed nucleotides are the reverse complement of two tandem stop codons, and (N)₁₅ is identical to the reverse complement of the last 15 nucleotides encoding the Therapeutic protein of interest. Once the PCR product is amplified it may be cut with Bsu36I and one of (Asc I, Fse I, or Pme I) and ligated into pScNHSA.

[1059] The presence of the Xho I site in the HSA chimeric leader sequence creates a single amino acid change in the end of the chimeric signal sequence, i.e. the HSA-kex2 signal sequence, from LDKR (SEQ ID NO:44) to LEKR (SEQ ID NO:45).

[1060] Generation of Albumin Fusion Constructs Comprising Gene-HSA Fusion Products.

[1061] Similar to the method described above, DNA encoding a Therapeutic protein may be PCR amplified using the following primers: A 5′ primer that adds polynucleotides containing a SalI site and encoding the last three amino acids of the HSA leader sequence, DKR, onto the 5′ end of DNA encoding a Therapeutic protein; and a 3′ primer that adds polynucleotides encoding the first few amino acids of the mature HSA containing a Cla I site onto the 3′ end of DNA encoding a Therapeutic protein. For instance, the forward primer used to amplify the DNA encoding a Therapeutic protein might have the sequence, 5′-aggagcgtcGACAAAAGA(N)₁₅-3′ (SEQ ID NO:46) where the underlined sequence is a Sal I site, the upper case nucleotides encode the last three amino acids of the HSA leader sequence (DKR), and (N)₁₅ is identical to the first 15 nucleotides encoding the Therapeutic protein of interest. Similarly, the reverse primer used to amplify the DNA encoding a Therapeutic protein might have the sequence, 5′-CTTTAAATCGATGAGCAACCTCACTCTTGTGTGCATC(N)₁₅-3′ (SEQ ID NO:47) where the italicized sequence is a Cla I site, the underlined nucleotides are the reverse complement of the DNA encoding the first 9 amino acids of the mature form of HSA (DAHKSEVAH, SEQ ID NO:48), and (N)₁₅ is identical to the reverse complement of the last 15 nucleotides encoding the Therapeutic protein of interest. Once the PCR product is amplified it may be cut with Sal I and Cla I and ligated into pScCHSA digested with Xho I and Cla I. A different signal or leader sequence may be desired, for example, invertase “INV” (Swiss-Prot Accession P00724), mating factor alpha “MAF” (Genbank Accession AAA18405), MPIF (Geneseq AAF82936), Fibulin B (Swiss-Prot Accession P23142), Clusterin (Swiss-Prot Accession P10909), Insulin-Like Growth Factor-Binding Protein 4 (Swiss-Prot Accession P22692), and permutations of the HSA leader sequence can be subcloned into the appropriate vector by means of standard methods known in the art.

[1062] Generation of Albumin Fusion Construct Compatible for Expression in Yeast S. Cerevisiae.

[1063] The Not I fragment containing the DNA encoding either an N-terminal or C-terminal albumin fusion protein generated from pScNHSA or pScCHSA may then be cloned into the Not I site of pSAC35 which has a LEU2 selectable marker. The resulting vector is then used in transformation of a yeast S. cerevisiae expression system.

### Example 3

### General Expression in Yeast S. Cerevisiae

[1064] An expression vector compatible with yeast expression can be transformed into yeast S. cerevisiae by lithium acetate transformation, electroporation, or other methods known in the art and or as described in part in Sambrook, Fritsch, and Maniatis. 1989. “Molecular Cloning: A Laboratory Manual, 2^{nd} edition”, volumes 1-3, and in Ausubel et al. 2000. Massachusetts General Hospital and Harvard Medical School “Current Protocols in Molecular Biology”, volumes 1-4. The expression vectors are introduced into S. cerevisiae strains DXY1, D88, or BXP10 by transformation, individual transformants can be grown, for example, for 3 days at 30° C. in 10 mL YEPD (1% w/v yeast extract, 2% w/v, peptone, 2% w/v, dextrose), and cells can be collected at stationary phase after 60 hours of growth. Supernatants are collected by clarifying cells at 3000 g for 10 minutes.

[1065] pSAC35 (Sleep et al., 1990, Biotechnology 8:42 and see FIG. 3) comprises, in addition to the LEU2 selectable marker, the entire yeast 2 μm plasmid to provide replication functions, the PRB1 promoter, and the ADH1 termination signal.

### Example 4

### General Purification of an Albumin Fusion Protein Expressed from an Albumin Fusion in Yeast S. Cerevisiae.

[1066] In preferred embodiments, albumin fusion proteins of the invention comprise the mature form of HSA fused to either the N- or C-terminus of the mature form of a therapeutic protein or portions thereof (e.g., the mature form of a therapeutic protein listed in Table 1, or the mature form of a therapeutic protein shown in Table 2 as SEQ ID NO:Z). In one embodiment of the invention, albumin fusion proteins of the invention further comprise a signal sequence which directs the nascent fusion polypeptide in the secretory pathways of the host used for expression. In a preferred embodiment, the signal peptide encoded by the signal sequence is removed, and the mature albumin fusion protein is secreted directly into the culture medium. Albumin fusion proteins of the invention preferably comprise heterologous signal sequences (e.g., the non-native signal sequence of a particular therapeutic protein) including, but not limited to, MAF, INV, Ig, Fibulin B, Clusterin, Insulin-Like Growth Factor Binding Protein 4, variant HSA leader sequences including, but not limited to, a chimeric HSA/MAF leader sequence, or other heterologous signal sequences known in the art. Especially preferred as those signal sequence listed in Table 2 and/or the signal sequence listed in the “Expression of Fusion Proteins” and/or “Additional Methods of Recombinant and Synthetic Production of Albumin Fusion Proteins” section of the specification, above. In preferred embodiments, the fusion proteins of the invention further comprise an N-terminal methionine residue. Polynucleotides encoding these polypeptides, including fragments and/or variants, are also encompassed by the invention.

[1067] Albumin fusion proteins expressed in yeast as described above can be purified on a small-scale over a Dyax peptide affinity column as follows. Supernatants from yeast expressing an albumin fusion protein is diafiltrated against 3 mM phosphate buffer pH 6.2, 20 mM NaCl and 0.01% Tween 20 to reduce the volume and to remove the pigments. The solution is then filtered through a 0.22 μm device. The filtrate is loaded onto a Dyax peptide affinity column. The column is eluted with 100 mM Tris/HCl, pH 8.2 buffer. The peak fractions containing protein are collected and analyzed on SDS-PAGE after concentrating 5-fold.

[1068] For large scale purification, the following method can be utilized. The supernatant in excess of 2 L is diafiltered and concentrated to 500 mL in 20 mM Tris/HCl pH 8.0. The concentrated protein solution is loaded onto a pre-equilibrated 50 mL DEAE-Sepharose Fast Flow column, the column is washed, and the protein is eluted with a linear gradient of NaCl from 0 to 0.4 M NaCl in 20 mM Tris/HCl, pH 8.0. Those fractions containing the protein are pooled, adjusted to pH 6.8 with 0.5 M sodium phosphate (NaH₂PO₄). A final concentration of 0.9 M (NH₄)₂SO₄ is added to the protein solution and the whole solution is loaded onto a pre-equilibrated 50 mL Butyl650S column. The protein is eluted with a linear gradient of ammonium sulfate (0.9 to 0 M (NH₄)₂SO₄). Those fractions with the albumin fusion are again pooled, diafiltered against 10 mM Na₂HPO₄/citric acid buffer pH 5.75, and loaded onto a 50 mL pre-equilibrated SP-Sepharose Fast Flow column. The protein is eluted with a NaCl linear gradient from 0 to 0.5 M. The fractions containing the protein of interest are combined, the buffer is changed to 10 mM Na₂HPO₄/citric acid pH 6.25 with an Amicon concentrator, the conductivity is <2.5 mS/cm. This protein solution is loaded onto a 15 mL pre-equilibrated Q-Sepharose high performance column, the column is washed, and the protein is eluted with a NaCl linear gradient from 0 to 0.15 M NaCl. The purified protein can then be formulated into a specific buffer composition by buffer exchange.

### Example 5

### General Construct Generation for Mammalian Cell Transfection

[1069] Generation of Albumin Fusion Construct Compatible for Expression in Mammalian Cell-Lines.

[1070] Albumin fusion constructs can be generated in expression vectors for use in mammalian cell culture systems. DNA encoding a therapeutic protein can be cloned N-terminus or C-terminus to HSA in a mammalian expression vector by standard methods known in the art (e.g., PCR amplification, restriction digestion, and ligation). Once the expression vector has been constructed, transfection into a mammalian expression system can proceed. Suitable vectors are known in the art including, but not limited to, for example, the pC4 vector, and/or vectors available from Lonza Biologics, Inc. (Portsmouth, N.H.).

[1071] The DNA encoding human serum albumin has been cloned into the pC4 vector which is suitable for mammalian culture systems, creating plasmid pC4:HSA (ATCC Deposit # PTA-3277). This vector has a DiHydroFolate Reductase, “DHFR”, gene that will allow for selection in the presence of methotrexate.

[1072] The pC4:HSA vector is suitable for expression of albumin fusion proteins in CHO cells. For expression, in other mammalian cell culture systems, it may be desirable to subclone a fragment comprising, or alternatively consisting of, DNA which encodes for an albumin fusion protein into an alternative expression vector. For example, a fragment comprising, or alternatively consisting, of DNA which encodes for a mature albumin fusion protein may be subcloned into another expression vector including, but not limited to, any of the mammalian expression vectors described herein.

[1073] In a preferred embodiment, DNA encoding an albumin fusion construct is subcloned into vectors provided by Lonza Biologics, Inc. (Portsmouth, N.H.) by procedures known in the art for expression in NS0 cells.

[1074] Generation of Albumin Fusion Constructs Comprising HSA-Therapeutic Protein Fusion Products.

[1075] Using pC4:HSA (ATCC Deposit # PTA-3277), albumin fusion constructs can be generated in which the Therapeutic protein portion is C terminal to the mature albumin sequence. For example, one can clone DNA encoding a Therapeutic protein of fragment or variant thereof between the Bsu 36I and Asc I restriction sites of the vector. When cloning into the Bsu 36I and Asc I, the same primer design used to clone into the yeast vector system (SEQ ID NO:42 and 43) may be employed (see Example 2).

[1076] Generation of Albumin Fusion Constructs Comprising Gene-HSA Fusion Products.

[1077] Using pC4:HSA (ATCC Deposit # PTA-3277), albumin fusion constructs can be generated in which a Therapeutic protein portion is cloned N terminal to the mature albumin sequence. For example, one can clone DNA encoding a Therapeutic protein that has its own signal sequence between the Bam HI (or Hind III) and Cla I sites of pC4:HSA. When cloning into either the Bam HI or Hind III site, it is preferable to include a Kozak sequence (CCGCCACCATG, SEQ ID NO:49) prior to the translational start codon of the DNA encoding the Therapeutic protein. If a Therapeutic protein does not have a signal sequence, DNA encoding that Therapeutic protein may be cloned in between the Xho I and Cla I sites of pC4:HSA. When using the Xho I site, the following 5′ (SEQ ID NO:50) and 3′ (SEQ ID NO:51) exemplary PCR primers may be used:

(SEQ ID NO: 50)

5′-CCGCCGCTCGAGGGGTGTGTTTCGTCGA(N)₁₈-3′

(SEQ ID NO: 51)

5′-AGTCCCATCGATGAGCAACCTCACTCTTGTGTGCATC(N)₁₈-3′

[1078] In the 5′ primer (SEQ ID NO:50), the underlined sequence is a Xho I site; and the Xho I site and the DNA following the Xho I site code for the last seven amino acids of the leader sequence of natural human serum albumin. In SEQ ID NO:50, “(N)₁₈” is DNA identical to the first 18 nucleotides encoding the Therapeutic protein of interest. In the 3′ primer (SEQ ID NO:51), the underlined sequence is a Cla I site; and the Cla I site and the DNA following it are the reverse complement of the DNA encoding the first 10 amino acids of the mature HSA protein (SEQ ID NO:1). In SEQ ID NO:51 “(N)₁₈” is the reverse complement of DNA encoding the last 18 nucleotides encoding the Therapeutic protein of interest. Using these two primers, one may PCR amplify the Therapeutic protein of interest, purify the PCR product, digest it with Xho I and Cla I restriction enzymes and clone it into the Xho I and Cla I sites in the pC4:HSA vector.

[1079] If an alternative leader sequence is desired, the native albumin leader sequence can be replaced with the chimeric albumin leader, i.e., the HSA-kex2 signal peptide, or an alternative leader by standard methods known in the art. (For example, one skilled in the art could routinely PCR amplify an alternate leader and subclone the PCR product into an albumin fusion construct in place of the albumin leader while maintaining the reading frame).

### Example 6

### General Expression in Mammalian Cell-Lines

[1080] An albumin fusion construct generated in an expression vector compatible with expression in mammalian cell-lines can be transfected into appropriate cell-lines by calcium phosphate precipitation, lipofectamine, electroporation, or other transfection methods known in the art and/or as described in Sambrook, Fritsch, and Maniatis. 1989. “Molecular Cloning: A Laboratory Manual, 2^{nd} edition” and in Ausubel et al. 2000. Massachusetts General Hospital and Harvard Medical School “Current Protocols in Molecular Biology”, volumes 1-4. The transfected cells are then selected for by the presence of a selecting agent determined by the selectable marker in the expression vector.

[1081] The pC4 expression vector (ATCC Accession No. 209646) is a derivative of the plasmid pSV2-DHFR (ATCC Accession No. 37146). pC4 contains the strong promoter Long Terminal Repeats “LTR” of the Rous Sarcoma Virus (Cullen et al., March 1985, Molecular and Cellular Biology, 438-447) and a fragment of the CytoMegaloVirus “CMV”-enhancer (Boshart et al., 1985, Cell 41: 521-530). The vector also contains the 3′ intron, the polyadenylation and termination signal of the rat preproinsulin gene, and the mouse DHFR gene under control of the SV40 early promoter. Chinese hamster ovary “CHO” cells or other cell-lines lacking an active DHFR gene are used for transfection. Transfection of an albumin fusion construct in pC4 into CHO cells by methods known in the art will allow for the expression of the albumin fusion protein in CHO cells, followed by leader sequence cleavage, and secretion into the supernatant. The albumin fusion protein is then further purified from the supernatant.

[1082] The pEE12.1 expression vector is provided by Lonza Biologics, Inc. (Portsmouth, N.H.) and is a derivative of pEE6 (Stephens and Cockett, 1989, Nucl. Acids Res. 17: 7110). This vector comprises a promoter, enhancer and complete 5′-untranslated region of the Major Immediate Early gene of the human CytoMegaloVirus, “hCMV-MIE” (International Publication # WO89/01036), upstream of a sequence of interest, and a Glutamine Synthetase gene (Murphy et al., 1991, Biochem J. 227: 277-279; Bebbington et al., 1992, Bio/Technology 10:169-175; U.S. Pat. No. 5,122,464) for purposes of selection of transfected cells in selective methionine sulphoximine containing medium. Transfection of albumin fusion constructs made in pEE12.1 into NS0 cells (International Publication # WO86/05807) by methods known in the art will allow for the expression of the albumin fusion protein in NS0 cells, followed by leader sequence cleavage, and secretion into the supernatant. The albumin fusion protein is then further purified from the supernatant using techniques described herein or otherwise known in the art.

[1083] Expression of an albumin fusion protein may be analyzed, for example, by SDS-PAGE and Western blot, reversed phase HPLC analysis, or other methods known in the art.

[1084] Stable CHO and NS0 cell-lines transfected with albumin fusion constructs are generated by methods known in the art (e.g., lipofectamine transfection) and selected, for example, with 100 nM methotrexate for vectors having the DiHydroFolate Reductase ‘DHFR’ gene as a selectable marker or through growth in the absence of glutamine. Expression levels can be examined for example, by immunoblotting, primarily, with an anti-HSA serum as the primary antibody, or, secondarily, with serum containing antibodies directed to the Therapeutic protein portion of a given albumin fusion protein as the primary antibody.

[1085] Expression levels are examined by immunoblot detection with anti-HSA serum as the primary antibody. The specific productivity rates are determined via ELISA in which the capture antibody can be a monoclonal antibody towards the therapeutic protein portion of the albumin fusion and the detecting antibody can be the monoclonal anti-HSA-biotinylated antibody (or vice versa), followed by horseradish peroxidase/streptavidin binding and analysis according to the manufacturer's protocol.

### Example 7

### Expression of an Albumin Fusion Protein in Mammalian Cells

[1086] The albumin fusion proteins of the present invention can be expressed in a mammalian cell. A typical mammalian expression vector contains a promoter element, which mediates the initiation of transcription of mRNA, a protein coding sequence, and signals required for the termination of transcription and polyadenylation of the transcript. Additional elements include enhancers, Kozak sequences and intervening sequences flanked by donor and acceptor sites for RNA splicing. Highly efficient transcription is achieved with the early and late promoters from SV40, the long terminal repeats (LTRs) from Retroviruses, e.g., RSV, HTLVI, HIVI and the early promoter of the cytomegalovirus (CMV). However, cellular elements can also be used (e.g., the human actin promoter).

[1087] Suitable expression vectors for use in practicing the present invention include, for example, vectors such as, pSVL and pMSG (Pharmacia, Uppsala, Sweden), pRSVcat (ATCC 37152), pSV2dhfr (ATCC 37146), pBC12MI (ATCC 67109), pCMVSport 2.0, and pCMVSport 3.0. Mammalian host cells that could be used include, but are not limited to, human Hela, 293, H9 and Jurkat cells, mouse NIH3T3 and C127 cells, Cos 1, Cos 7 and CV1, quail QC1-3 cells, mouse L cells and Chinese hamster ovary (CHO) cells.

[1088] Alternatively, the albumin fusion protein can be expressed in stable cell lines containing the polynucleotide encoding the albumin fusion protein integrated into a chromosome. The co-transfection with a selectable marker such as DHFR, gpt, neomycin, or hygromycin allows the identification and isolation of the transfected cells.

[1089] The transfected polynucleotide encoding the fusion protein can also be amplified to express large amounts of the encoded fusion protein. The DHFR (dihydrofolate reductase) marker is useful in developing cell lines that carry several hundred or even several thousand copies of the gene of interest. (See, e.g., Alt et al., J. Biol. Chem. 253:1357-1370 (1978); Hamlin et al., Biochem. et Biophys. Acta, 1097:107-143 (1990); Page et al., Biotechnology 9:64-68 (1991)). Another useful selection marker is the enzyme glutamine synthase (GS) (Murphy et al., Biochem J. 227:277-279 (1991); Bebbington et al., Bio/Technology 10: 169-175 (1992). Using these markers, the mammalian cells are grown in selective medium and the cells with the highest resistance are selected. These cell lines contain the amplified gene(s) integrated into a chromosome. Chinese hamster ovary (CHO) and NSO cells are often used for the production of proteins.

[1090] Derivatives of the plasmid pSV2-dhfr (ATCC Accession No. 37146), the expression vectors pC4 (ATCC Accession No. 209646) and pC6 (ATCC Accession No. 209647) contain the strong promoter (LTR) of the Rous Sarcoma Virus (Cullen et al., Molecular and Cellular Biology, 438-447 (March, 1985)) plus a fragment of the CMV-enhancer (Boshart et al., Cell 41:521-530 (1985)). Multiple cloning sites, e.g., with the restriction enzyme cleavage sites BamHI, XbaI and Asp718, facilitate the cloning of the gene of interest. The vectors also contain the 3′ intron, the polyadenylation and termination signal of the rat preproinsulin gene, and the mouse DHFR gene under control of the SV40 early promoter.

[1091] Specifically, the plasmid pC6, for example, is digested with appropriate restriction enzymes and then dephosphorylated using calf intestinal phosphates by procedures known in the art. The vector is then isolated from a 1% agarose gel.

[1092] A polynucleotide encoding an albumin fusion protein of the present invention is generated using techniques known in the art and this polynucleotide is amplified using PCR technology known in the art. If a naturally occurring signal sequence is used to produce the fusion protein of the present invention, the vector does not need a second signal peptide. Alternatively, if a naturally occurring signal sequence is not used, the vector can be modified to include a heterologous signal sequence. (See, e.g., International Publication No. WO 96/34891.)

[1093] The amplified fragment encoding the fusion protein of the invention is isolated from a 1% agarose gel using a commercially available kit (“Geneclean,” BIO 101 Inc., La Jolla, Calif.). The fragment then is digested with appropriate restriction enzymes and again purified on a 1% agarose gel.

[1094] The amplified fragment encoding the albumin fusion protein of the invention is then digested with the same restriction enzyme and purified on a 1% agarose gel. The isolated fragment and the dephosphorylated vector are then ligated with T4 DNA ligase. E. coli HB101 or XL-1 Blue cells are then transformed and bacteria are identified that contain the fragment inserted into plasmid pC6 using, for instance, restriction enzyme analysis.

[1095] Chinese hamster ovary cells lacking an active DHFR gene is used for transfection. Five μg of the expression plasmid pC6 or pC4 is cotransfected with 0.5 μg of the plasmid pSVneo using lipofectin (Felgner et al., supra). The plasmid pSV2-neo contains a dominant selectable marker, the neo gene from Tn5 encoding an enzyme that confers resistance to a group of antibiotics including G418. The cells are seeded in alpha minus MEM supplemented with 1 mg/ml G418. After 2 days, the cells are trypsinized and seeded in hybridoma cloning plates (Greiner, Germany) in alpha minus MEM supplemented with 10, 25, or 50 ng/ml of methotrexate plus 1 mg/ml G418. After about 10-14 days single clones are trypsinized and then seeded in 6-well petri dishes or 10 ml flasks using different concentrations of methotrexate (50 nM, 100 nM, 200 nM, 400 nM, 800 nM). Clones growing at the highest concentrations of methotrexate are then transferred to new 6-well plates containing even higher concentrations of methotrexate (1 μM, 2 μM, 5 μM, 10 mM, 20 mM). The same procedure is repeated until clones are obtained which grow at a concentration of 100-200 μM. Expression of the desired fusion protein is analyzed, for instance, by SDS-PAGE and Western blot or by reversed phase HPLC analysis.

### Example 8

### General Purification of an Albumin Fusion Protein Expressed from an Albumin Fusion Construct in Mammalian Cell-Lines

[1096] In preferred embodiments, albumin fusion proteins of the invention comprise the mature form of HSA fused to either the N- or C-terminus of the mature form of a therapeutic protein or portions thereof (e.g., the mature form of a therapeutic protein listed in Table 1, or the mature form of a therapeutic protein shown in Table 2 as SEQ ID NO:Z). In one embodiment of the invention, albumin fusion proteins of the invention further comprise a signal sequence which directs the nascent fusion polypeptide in the secretory pathways of the host used for expression. In a preferred embodiment, the signal peptide encoded by the signal sequence is removed, and the mature albumin fusion protein is secreted directly into the culture medium. Albumin fusion proteins of the invention preferably comprise heterologous signal sequences (e.g., the non-native signal sequence of a particular therapeutic protein) including, but not limited to, MAF, INV, Ig, Fibulin B, Clusterin, Insulin-Like Growth Factor Binding Protein 4, variant HSA leader sequences including, but not limited to, a chimeric HSA/MAF leader sequence, or other heterologous signal sequences known in the art. Especially preferred as those signal sequence listed in Table 2 and/or the signal sequence listed in the “Expression of Fusion Proteins” and/or “Additional Methods of Recombinant and Synthetic Production of Albumin Fusion Proteins” section of the specification, above. In preferred embodiments, the fusion proteins of the invention further comprise an N-terminal methionine residue. Polynucleotides encoding these polypeptides, including fragments and/or variants, are also encompassed by the invention.

[1097] Albumin fusion proteins from mammalian cell-line supernatants are purified according to different protocols depending on the expression system used.

[1098] Purification from CHO and 293T Cell-Lines.

[1099] Purification of an albumin fusion protein from CHO cell supernatant or from transiently transfected 293T cell supernatant may involve initial capture with an anionic HQ resin using a sodium phosphate buffer and a phosphate gradient elution, followed by affinity chromatography on a Blue Sepharose FF column using a salt gradient elution. Blue Sepharose FF removes the main BSA/fetuin contaminants. Further purification over the Poros PI 50 resin with a phosphate gradient may remove and lower endotoxin contamination as well as concentrate the albumin fusion protein.

[1100] Purification from NS0 Cell-Line.

[1101] Purification of an albumin-fusion protein from NS0 cell supernatant may involve Q-Sepharose anion exchange chromatography, followed by SP-sepharose purification with a step elution, followed by Phenyl-650M purification with a step elution, and, ultimately, diafiltration.

[1102] The purified protein may then be formulated by buffer exchange.

### Example 9

### Bacterial Expression of an Albumin Fusion Protein

[1103] A polynucleotide encoding an albumin fusion protein of the present invention comprising a bacterial signal sequence is amplified using PCR oligonucleotide primers corresponding to the 5′ and 3′ ends of the DNA sequence, to synthesize insertion fragments. The primers used to amplify the polynucleotide encoding insert should preferably contain restriction sites, such as BamHI and XbaI, at the 5′ end of the primers in order to clone the amplified product into the expression vector. For example, BamHI and XbaI correspond to the restriction enzyme sites on the bacterial expression vector pQE-9. (Qiagen, Inc., Chatsworth, Calif.). This plasmid vector encodes antibiotic resistance (Amp^{r}), a bacterial origin of replication (ori), an IPTG-regulatable promoter/operator (P/O), a ribosome binding site (RBS), a 6-histidine tag (6-His), and restriction enzyme cloning sites.

[1104] The pQE-9 vector is digested with BamHI and XbaI and the amplified fragment is ligated into the pQE-9 vector maintaining the reading frame initiated at the bacterial RBS. The ligation mixture is then used to transform the E. coli strain M15/rep4 (Qiagen, Inc.) which contains multiple copies of the plasmid pREP4, which expresses the lacI repressor and also confers kanamycin resistance (Kan^{r}). Transformants are identified by their ability to grow on LB plates and ampicillin/kanamycin resistant colonies are selected. Plasmid DNA is isolated and confirmed by restriction analysis.

[1105] Clones containing the desired constructs are grown overnight (O/N) in liquid culture in LB media supplemented with both Amp (100 ug/ml) and Kan (25 ug/ml). The O/N culture is used to inoculate a large culture at a ratio of 1:100 to 1:250. The cells are grown to an optical density 600 (O.D.⁶⁰⁰) of between 0.4 and 0.6. IPTG (Isopropyl-B-D-thiogalacto pyranoside) is then added to a final concentration of 1 mM. IPTG induces by inactivating the lacI repressor, clearing the P/O leading to increased gene expression.

[1106] Cells are grown for an extra 3 to 4 hours. Cells are then harvested by centrifugation (20 mins at 6000×g). The cell pellet is solubilized in the chaotropic agent 6 Molar Guanidine HCl or preferably in 8 M urea and concentrations greater than 0.14 M 2-mercaptoethanol by stirring for 3-4 hours at 4° C. (see, e.g., Burton et al., Eur. J. Biochem. 179:379-387 (1989)). The cell debris is removed by centrifugation, and the supernatant containing the polypeptide is loaded onto a nickel-nitrilo-tri-acetic acid (“Ni-NTA”) affinity resin column (available from QIAGEN, Inc., supra). Proteins with a 6×His tag bind to the Ni-NTA resin with high affinity and can be purified in a simple one-step procedure (for details see: The QIAexpressionist (1995) QIAGEN, Inc., supra).

[1107] Briefly, the supernatant is loaded onto the column in 6 M guanidine-HCl, pH 8. The column is first washed with 10 volumes of 6 M guanidine-HCl, pH 8, then washed with 10 volumes of 6 M guanidine-HCl pH 6, and finally the polypeptide is eluted with 6 M guanidine-HCl, pH 5.

[1108] The purified protein is then renatured by dialyzing it against phosphate-buffered saline (PBS) or 50 mM Na-acetate, pH 6 buffer plus 200 mM NaCl. Alternatively, the protein can be successfully refolded while immobilized on the Ni-NTA column. Exemplary conditions are as follows: renature using a linear 6M-1M urea gradient in 500 mM NaCl, 20% glycerol, 20 mM Tris/HCl pH 7.4, containing protease inhibitors. The renaturation should be performed over a period of 1.5 hours or more. After renaturation the proteins are eluted by the addition of 250 mM imidazole. Imidazole is removed by a final dialyzing step against PBS or 50 mM sodium acetate pH 6 buffer plus 200 mM NaCl. The purified protein is stored at 4° C. or frozen at −80° C.

[1109] In addition to the above expression vector, the present invention further includes an expression vector, called pHE4a (ATCC Accession Number 209645, deposited on Feb. 25, 1998) which contains phage operator and promoter elements operatively linked to a polynucleotide encoding an albumin fusion protein of the present invention, called pHE4a. (ATCC Accession Number 209645, deposited on Feb. 25, 1998.) This vector contains: 1) a neomycinphosphotransferase gene as a selection marker, 2) an E. coli origin of replication, 3) a T5 phage promoter sequence, 4) two lac operator sequences, 5) a Shine-Delgarno sequence, and 6) the lactose operon repressor gene (lacIq). The origin of replication (oriC) is derived from pUC19 (LTI, Gaithersburg, Md.). The promoter and operator sequences are made synthetically.

[1110] DNA can be inserted into the pHE4a by restricting the vector with NdeI and XbaI, BamHI, XhoI, or Asp718, running the restricted product on a gel, and isolating the larger fragment (the stuffer fragment should be about 310 base pairs). The DNA insert is generated according to PCR protocols described herein or otherwise known in the art, using PCR primers having restriction sites for NdeI (5′ primer) and XbaI, BamHI, XhoI, or Asp718 (3′ primer). The PCR insert is gel purified and restricted with compatible enzymes. The insert and vector are ligated according to standard protocols.

[1111] The engineered vector may be substituted in the above protocol to express protein in a bacterial system.

### Example 10

### Isolation of a Selected cDNA Clone From the Deposited Sample

[1112] Many of the albumin fusion constructs of the invention have been deposited with the ATCC as shown in Table 3. The albumin fusion constructs may comprise any one of the following expression vectors: the yeast S. cerevisiae expression vector pSAC35, the mammalian expression vector pC4, or the mammalian expression vector pEE12.1.

[1113] pSAC35 (Sleep et al., 1990, Biotechnology 8:42), pC4 (ATCC Accession No. 209646; Cullen et al., Molecular and Cellular Biology, 438-447 (1985); Boshart et al., Cell 41: 521-530 (1985)), and pEE12.1 (Lonza Biologics, Inc.; Stephens and Cockett, Nucl. Acids Res. 17: 7110 (1989); International Publication #WO89/01036; Murphy et al., Biochem J. 227: 277-279 (1991); Bebbington et al., Bio/Technology 10: 169-175 (1992); U.S. Pat. No. 5,122,464; International Publication #WO86/05807) vectors comprise an ampicillin resistance gene for growth in bacterial cells. These vectors and/or an albumin fusion construct comprising them can be transformed into an E. coli strain such as Stratagene XL-1 Blue (Stratagene Cloning Systems, Inc., 11011 N. Torrey Pines Road, La Jolla, Calif., 92037) using techniques described in the art such as Hanahan, spread onto Luria-Broth agar plates containing 100 μg/mL ampicillin, and grown overnight at 37° C.

[1114] The deposited material in the sample assigned the ATCC Deposit Number cited in Table 3 for any given albumin fusion construct also may contain one or more additional albumin fusion constructs, each encoding different albumin fusion proteins. Thus, deposits sharing the same ATCC Deposit Number contain at least an albumin fusion construct identified in the corresponding row of Table 3.

[1115] Two approaches can be used to isolate a particular albumin fusion construct from the deposited sample of plasmid DNAs cited for that albumin fusion construct in Table 3.

[1116] Method 1: Screening

[1117] First, an albumin fusion construct may be directly isolated by screening the sample of deposited plasmid DNAs using a polynucleotide probe corresponding to SEQ ID NO:X for an individual construct ID number in Table 1, using methods known in the art. For example, a specific polynucleotide with 30-40 nucleotides may be synthesized using an Applied Biosystems DNA synthesizer according to the sequence reported. The oligonucleotide can be labeled, for instance, with ³²P-γ-ATP using T4 polynucleotide kinase and purified according to routine methods. (E.g., Maniatis et al., Molecular Cloning: A Laboratory Manual, Cold Spring Harbor Press, Cold Spring, N.Y. (1982)). The albumin fusion construct from a given ATCC deposit is transformed into a suitable host, as indicated above (such as XL-1 Blue (Stratagene)) using techniques known to those of skill in the art, such as those provided by the vector supplier or in related publications or patents cited above. The transformants are plated on 1.5% agar plates (containing the appropriate selection agent, e.g., ampicillin) to a density of about 150 transformants (colonies) per plate. These plates are screened using Nylon membranes according to routine methods for bacterial colony screening (e.g., Sambrook et al., Molecular Cloning: A Laboratory Manual, 2nd Edit., (1989), Cold Spring Harbor Laboratory Press, pages 1.93 to 1.104), or other techniques known to those of skill in the art.

[1118] Method 2: PCR

[1119] Alternatively, DNA encoding a given albumin fusion protein may be amplified from a sample of a deposited albumin fusion construct with SEQ ID NO:X, for example, by using two primers of 17-20 nucleotides that hybridize to the deposited albumin fusion construct 5′ and 3′ to the DNA encoding a given albumin fusion protein. The polymerase chain reaction is carried out under routine conditions, for instance, in 25 μl of reaction mixture with 0.5 ug of the above cDNA template. A convenient reaction mixture is 1.5-5 mM MgCl₂, 0.01% (w/v) gelatin, 20 μM each of dATP, dCTP, dGTP, dTTP, 25 μmol of each primer and 0.25 Unit of Taq polymerase. Thirty five cycles of PCR (denaturation at 94° C. for 1 min; annealing at 55° C. for 1 min; elongation at 72° C. for 1 min) are performed with a Perkin-Elmer Cetus automated thermal cycler. The amplified product is analyzed by agarose gel electrophoresis and the DNA band with expected molecular weight is excised and purified. The PCR product is verified to be the selected sequence by subcloning and sequencing the DNA product.

[1120] Several methods are available for the identification of the 5′ or 3′ non-coding portions of a gene which may not be present in the deposited clone. These methods include but are not limited to, filter probing, clone enrichment using specific probes, and protocols similar or identical to 5′ and 3′ “RACE” protocols which are known in the art. For instance, a method similar to 5′ RACE is available for generating the missing 5′ end of a desired full-length transcript. (Fromont-Racine et al., Nucleic Acids Res., 21(7):1683-1684 (1993)).

[1121] Briefly, a specific RNA oligonucleotide is ligated to the 5′ ends of a population of RNA presumably containing full-length gene RNA transcripts. A primer set containing a primer specific to the ligated RNA oligonucleotide and a primer specific to a known sequence of the gene of interest is used to PCR amplify the 5′ portion of the desired full-length gene. This amplified product may then be sequenced and used to generate the full length gene.

[1122] This above method starts with total RNA isolated from the desired source, although poly-A+ RNA can be used. The RNA preparation can then be treated with phosphatase if necessary to eliminate 5′ phosphate groups on degraded or damaged RNA which may interfere with the later RNA ligase step. The phosphatase should then be inactivated and the RNA treated with tobacco acid pyrophosphatase in order to remove the cap structure present at the 5′ ends of messenger RNAs. This reaction leaves a 5′ phosphate group at the 5′ end of the cap cleaved RNA which can then be ligated to an RNA oligonucleotide using T4 RNA ligase.

[1123] This modified RNA preparation is used as a template for first strand cDNA synthesis using a gene specific oligonucleotide. The first strand synthesis reaction is used as a template for PCR amplification of the desired 5′ end using a primer specific to the ligated RNA oligonucleotide and a primer specific to the known sequence of the gene of interest. The resultant product is then sequenced and analyzed to confirm that the 5′ end sequence belongs to the desired gene.

### Example 11

### Multifusion Fusions

[1124] The albumin fusion proteins (e.g., containing a Therapeutic protein (or fragment or variant thereof) fused to albumin (or a fragment or variant thereof)) may additionally be fused to other proteins to generate “multifusion proteins”. These multifusion proteins can be used for a variety of applications. For example, fusion of the albumin fusion proteins of the invention to His-tag, HA-tag, protein A, IgG domains, and maltose binding protein facilitates purification. (See e.g., EP A 394,827; Traunecker et al., Nature 331:84-86 (1988)). Nuclear localization signals fused to the polypeptides of the present invention can target the protein to a specific subcellular localization, while covalent heterodimer or homodimers can increase or decrease the activity of an albumin fusion protein. Furthermore, the fusion of additional protein sequences to the albumin fusion proteins of the invention may further increase the solubility and/or stability of the fusion protein. The fusion proteins described above can be made using or routinely modifying techniques known in the art and/or by modifying the following protocol, which outlines the fusion of a polypeptide to an IgG molecule.

[1125] Briefly, the human Fc portion of the IgG molecule can be PCR amplified, using primers that span the 5′ and 3′ ends of the sequence described below. These primers also should have convenient restriction enzyme sites that will facilitate cloning into an expression vector, preferably a mammalian or yeast expression vector.

[1126] For example, if pC4 (ATCC Accession No. 209646) is used, the human Fc portion can be ligated into the BamHI cloning site. Note that the 3′ BamHI site should be destroyed. Next, the vector containing the human Fc portion is re-restricted with BamHI, linearizing the vector, and a polynucleotide encoding an albumin fusion protein of the present invention (generated and isolated using techniques known in the art), is ligated into this BamHI site. Note that the polynucleotide encoding the fusion protein of the invention is cloned without a stop codon, otherwise a Fc containing fusion protein will not be produced.

[1127] If the naturally occurring signal sequence is used to produce the albumin fusion protein of the present invention, pC4 does not need a second signal peptide. Alternatively, if the naturally occurring signal sequence is not used, the vector can be modified to include a heterologous signal sequence. (See, e.g., International Publication No. WO 96/34891.)

[1128] Human IgG Fc region:

(SEQ ID NO: 52)

GGGATCCGGAGCCCAAATCTTCTGACAAAACTCACACATGCCCACCGTGC
CCAGCACCTGAATTCGAGGGTGCACCGTCAGTCTTCCTCTTCCCCCCAAA
ACCCAAGGACACCCTCATGATCTCCCGGACTCCTGAGGTCACATGCGTGG
TGGTGGACGTAAGCCACGAAGACCCTGAGGTCAAGTTCAACTGGTACGTG
GACGGCGTGGAGGTGCATAATGCCAAGACAAAGCCGCGGGAGGAGCAGTA
CAACAGCACGTACCGTGTGGTCAGCGTCCTCACCGTCCTGCACCAGGACT
GGCTGAATGGCAAGGAGTACAAGTGCAAGGTCTCCAACAAAGCCCTCCCA
ACCCCCATCGAGAAAACCATCTCCAAAGCCAAAGGGCAGCCCCGAGAACC
ACAGGTGTACACCCTGCCCCCATCCCGGGATGAGCTGACCAAGAACCAGG
TCAGCCTGACCTGCCTGGTCAAAGGCTTCTATCCAAGCGACATCGCCGTG
GAGTGGGAGAGCAATGGGCAGCCGGAGAACAACTACAAGACCACGCCTCC
CGTGCTGGACTCCGACGGCTCCTTCTTCCTCTACAGCAAGCTCACCGTGG
ACAAGAGCAGGTGGCAGCAGGGGAACGTCTTCTCATGCTCCGTGATGCAT
GAGGCTCTGCACAACCACTACACGCAGAAGAGCCTCTCCCTGTCTCCGGG
TAAATGAGTGCGACGGCCGCGACTCTAGAGGAT

### Example 12

### Production of an Antibody from an Albumin Fusion Protein

[1129] Hybridoma Technology

[1130] Antibodies that bind the albumin fusion proteins of the present invention and portions of the albumin fusion proteins of the present invention (e.g., the Therapeutic protein portion or albumin portion of the fusion protein) can be prepared by a variety of methods. (See, Current Protocols, Chapter 2.) As one example of such methods, a preparation of an albumin fusion protein of the invention or a portion of an albumin fusion protein of the invention is prepared and purified to render it substantially free of natural contaminants. Such a preparation is then introduced into an animal in order to produce polyclonal antisera of greater specific activity.

[1131] Monoclonal antibodies specific for an albumin fusion protein of the invention, or a portion of an albumin fusion protein of the invention, are prepared using hybridoma technology (Kohler et al., Nature 256:495 (1975); Kohler et al., Eur. J. Immunol. 6:511 (1976); Kohler et al., Eur. J. Immunol. 6:292 (1976); Hammerling et al., in: Monoclonal Antibodies and T-Cell Hybridomas, Elsevier, N.Y., pp. 563-681 (1981)). In general, an animal (preferably a mouse) is immunized with an albumin fusion protein of the invention, or a portion of an albumin fusion protein of the invention. The splenocytes of such mice are extracted and fused with a suitable myeloma cell line. Any suitable myeloma cell line may be employed in accordance with the present invention; however, it is preferable to employ the parent myeloma cell line (SP20), available from the ATCC. After fusion, the resulting hybridoma cells are selectively maintained in HAT medium, and then cloned by limiting dilution as described by Wands et al. (Gastroenterology 80:225-232 (1981)). The hybridoma cells obtained through such a selection are then assayed to identify clones which secrete antibodies capable of binding an albumin fusion protein of the invention, or a portion of an albumin fusion protein of the invention.

[1132] Alternatively, additional antibodies capable of binding to an albumin fusion protein of the invention, or a portion of an albumin fusion protein of the invention can be produced in a two-step procedure using anti-idiotypic antibodies. Such a method makes use of the fact that antibodies are themselves antigens, and therefore, it is possible to obtain an antibody which binds to a second antibody. In accordance with this method, protein specific antibodies are used to immunize an animal, preferably a mouse. The splenocytes of such an animal are then used to produce hybridoma cells, and the hybridoma cells are screened to identify clones which produce an antibody whose ability to bind to the an albumin fusion protein of the invention (or portion of an albumin fusion protein of the invention)-specific antibody can be blocked by the fusion protein of the invention, or a portion of an albumin fusion protein of the invention. Such antibodies comprise anti-idiotypic antibodies to the fusion protein of the invention (or portion of an albumin fusion protein of the invention)-specific antibody and are used to immunize an animal to induce formation of further fusion protein of the invention (or portion of an albumin fusion protein of the invention)-specific antibodies.

[1133] For in vivo use of antibodies in humans, an antibody is “humanized”. Such antibodies can be produced using genetic constructs derived from hybridoma cells producing the monoclonal antibodies described above. Methods for producing chimeric and humanized antibodies are known in the art and are discussed herein. (See, for review, Morrison, Science 229:1202 (1985); Oi et al., BioTechniques 4:214 (1986); Cabilly et al., U.S. Pat. No. 4,816,567; Taniguchi et al., EP 171496; Morrison et al., EP 173494; Neuberger et al., WO 8601533; Robinson et al., International Publication No. WO 8702671; Boulianne et al., Nature 312:643 (1984); Neuberger et al., Nature 314:268 (1985)).

[1134] Isolation Of Antibody Fragments Directed Against an albumin fusion protein of the invention, or a portion of an albumin fusion protein of the invention From A Library Of scFvs. Naturally occurring V-genes isolated from human PBLs are constructed into a library of antibody fragments which contain reactivities against an albumin fusion protein of the invention, or a portion of an albumin fusion protein of the invention, to which the donor may or may not have been exposed (see e.g., U.S. Pat. No. 5,885,793 incorporated herein by reference in its entirety).

[1135] Rescue of the Library. A library of scFvs is constructed from the RNA of human PBLs as described in International Publication No. WO 92/01047. To rescue phage displaying antibody fragments, approximately 10⁹ E. coli harboring the phagemid are used to inoculate 50 ml of 2×TY containing 1% glucose and 100 μg/ml of ampicillin (2×TY-AMP-GLU) and grown to an O.D. of 0.8 with shaking. Five ml of this culture is used to inoculate 50 ml of 2×TY-AMP-GLU, 2×108 TU of delta gene 3 helper (M13 delta gene III, see International Publication No. WO 92/01047) are added and the culture incubated at 37° C. for 45 minutes without shaking and then at 37° C. for 45 minutes with shaking. The culture is centrifuged at 4000 r.p.m. for 10 min. and the pellet resuspended in 2 liters of 2×TY containing 100 μg/ml ampicillin and 50 ug/ml kanamycin and grown overnight. Phage are prepared as described in International Publication No. WO 92/01047.

[1136] M13 delta gene III is prepared as follows: M13 delta gene III helper phage does not encode gene III protein, hence the phage(mid) displaying antibody fragments have a greater avidity of binding to antigen. Infectious M13 delta gene III particles are made by growing the helper phage in cells harboring a pUC19 derivative supplying the wild type gene II protein during phage morphogenesis. The culture is incubated for 1 hour at 37° C. without shaking and then for a further hour at 37° C. with shaking. Cells are spun down (IEC-Centra 8,400 r.p.m. for 10 min), resuspended in 300 ml 2×TY broth containing 100 μg ampicillin/ml and 25 μg kanamycin/ml (2×TY-AMP-KAN) and grown overnight, shaking at 37° C. Phage particles are purified and concentrated from the culture medium by two PEG-precipitations (Sambrook et al., 1990), resuspended in 2 ml PBS and passed through a 0.45 μm filter (Minisart NML; Sartorius) to give a final concentration of approximately 10¹³ transducing units/ml (ampicillin-resistant clones).

[1137] Panning of the Library. Immunotubes (Nunc) are coated overnight in PBS with 4 ml of either 100 μg/ml or 10 μg/ml of an albumin fusion protein of the invention, or a portion of an albumin fusion protein of the invention. Tubes are blocked with 2% Marvel-PBS for 2 hours at 37° C. and then washed 3 times in PBS. Approximately 10¹³ TU of phage is applied to the tube and incubated for 30 minutes at room temperature tumbling on an over and under turntable and then left to stand for another 1.5 hours. Tubes are washed 10 times with PBS 0.1% Tween-20 and 10 times with PBS. Phage are eluted by adding 1 ml of 100 mM triethylamine and rotating 15 minutes on an under and over turntable after which the solution is immediately neutralized with 0.5 ml of 1.0M Tris-HCl, pH 7.4. Phage are then used to infect 10 ml of mid-log E. coli TG1 by incubating eluted phage with bacteria for 30 minutes at 37° C. The E. coli are then plated on TYE plates containing 1% glucose and 100 μg/ml ampicillin. The resulting bacterial library is then rescued with delta gene 3 helper phage as described above to prepare phage for a subsequent round of selection. This process is then repeated for a total of 4 rounds of affinity purification with tube-washing increased to 20 times with PBS, 0.1% Tween-20 and 20 times with PBS for rounds 3 and 4.

[1138] Characterization of Binders. Eluted phage from the 3rd and 4th rounds of selection are used to infect E. coli HB 2151 and soluble scFv is produced (Marks, et al., 1991) from single colonies for assay. ELISAs are performed with microtitre plates coated with either 10 pg/ml of an albumin fusion protein of the invention, or a portion of an albumin fusion protein of the invention, in 50 mM bicarbonate pH 9.6. Clones positive in ELISA are further characterized by PCR fingerprinting (see, e.g., International Publication No. WO 92/01047) and then by sequencing. These ELISA positive clones may also be further characterized by techniques known in the art, such as, for example, epitope mapping, binding affinity, receptor signal transduction, ability to block or competitively inhibit antibody/antigen binding, and competitive agonistic or antagonistic activity.

### Example 13

### [³H]-2-Deoxyglucose Uptake Assay

[1139] Adipose, skeletal muscle, and liver are insulin-sensitive tissues. Insulin can stimulate glucose uptake/transport into these tissues. In the case of adipose and skeletal muscle, insulin initiates the signal transduction that eventually leads to the translocation of the glucose transporter 4 molecule, GLUT4, from a specialized intracellular compartment to the cell surface. Once on the cell surface, GLUT4 allows for glucose uptake/transport.

[1140] [³H]-2-Deoxyglucose Uptake

[1141] A number of adipose and muscle related cell-lines can be used to test for glucose uptake/transport activity in the absence or presence of a combination of any one or more of the therapeutic drugs listed for the treatment of diabetes mellitus. In particular, the 3T3-L1 murine fibroblast cells and the L6 murine skeletal muscle cells can be differentiated into 3T3-L1 adipocytes and into myotubes, respectively, to serve as appropriate in vitro models for the [³H]-2-deoxyglucose uptake assay (Urso et al., J Biol Chem, 274(43): 30864-73 (1999); Wang et al., J Mol Endocrinol, 19(3): 241-8 (1997); Haspel et al., J Membr Biol, 169 (1): 45-53 (1999); Tsakiridis et al., Endocrinology, 136(10): 4315-22 (1995)). Briefly, 2×10⁵ cells/100 μL of adipocytes or differentiated L6 cells are transferred to 96-well Tissue-Culture, “TC”, treated, i.e., coated with 50 μg/mL of poly-L-lysine, plates in post-differentiation medium and are incubated overnight at 37° C. in 5% CO₂. The cells are first washed once with serum free low glucose DMEM medium and are then starved with 100 μL/well of the same medium and with 100 μL/well of either buffer or of a combination of any one or more of the therapeutic drugs listed for the treatment of diabetes mellitus, for example, increasing concentrations of 1 nM, 10 nM, and 100 nM of the therapeutics of the subject invention (e.g., specific fusions disclosed as SEQ ID NO:Y and fragments and variants thereof) for 16 hours at 37° C. in the absence or presence of 1 nM insulin. The plates are washed three times with 100 μL/well of HEPES buffered saline. Insulin is added at 1 nM in HEPES buffered saline for 30 min at 37° C. in the presence of 10 μM labeled [³H]-2-deoxyglucose (Amersham, #TRK672) and 10 μM unlabeled 2-deoxyglucose (SIGMA, D-3179). As control, the same conditions are carried out except in the absence of insulin. A final concentration of 10 μM cytochalasin B (SIGMA, C6762) is added at 100 μL/well in a separate well to measure the non-specific uptake. The cells are washed three times with HEPES buffered saline. Labeled, i.e., 10 μM of [³H]-2-deoxyglucose, and unlabeled, i.e., 10 μM of 2-deoxyglucose, are added for 10 minutes at room temperature. The cells are washed three times with cold Phosphate Buffered Sal ine, “PBS”. The cells are lysed upon the addition of 150 μL/well of 0.2 N NaOH and subsequent incubation with shaking for 20 minutes at room temperature. Samples are then transferred to a scintillation vial to which is added 5 mL of scintillation fluid. The vials are counted in a Beta-Scintillation counter. Uptake in duplicate conditions, the difference being the absence or presence of insulin, is determined with the following equation: [(Insulin counts per minute “cpm”—Non-Specific cpm)/(No Insulin cpm−Non-Specific cpm)]. Average responses fall within the limits of about 5-fold and 3-fold that of controls for adipocytes and myotubes, respectively.

[1142] Differentiation of Cells

[1143] The cells are allowed to become fully confluent in a T-75 cm² flask. The medium is removed and replaced with 25 mL of pre-differentiation medium for 48 hours. The cells are incubated at 37° C., in 5% CO₂, 85% humidity. After 48 hours, the pre-differentiation medium is removed and replaced with 25 mL differentiation medium for 48 hours. The cells are again incubated at 37° C., in 5% CO₂, 85% humidity. After 48 hours, the medium is removed and replaced with 30 mL post-differentiation medium. Post-differentiation medium is maintained for 14-20 days or until complete differentiation is achieved. The medium is changed every 2-3 days. Human adipocytes can be purchased from Zen-Bio, INC (# SA-1096).

### Example 14

### In Vitro Assay of [³H]-Thymidine Incorporation into Pancreatic Cell-Lines

[1144] It has recently been shown that GLP-1 induces differentiation of the rat pancreatic ductal epithelial cell-line ARIP in a time- and dose-dependent manner which is associated with an increase in Islet Duodenal Homeobox-1 (IDX-1) and insulin mRNA levels (Hui et al., 2001, Diabetes, 50(4): 785-96). The IDX-1 in turn increases mRNA levels of the GLP-1 receptor.

[1145] Cells Types Tested

[1146] RIN-M cells: These cells are available from the American Type Tissue Culture Collection (ATCC Cell Line Number CRL-2057). The RIN-M cell line was derived from a radiation induced transplantable rat islet cell tumor. The line was established from a nude mouse xenograft of the tumor. The cells produce and secrete islet polypeptide hormones, and produce L-dopa decarboxylase (a marker for cells having amine precursor uptake and decarboxylation, or APUD, activity).

[1147] ARIP cells: These are pancreatic exocrine cells of epithelial morphology available from the American Type Tissue Culture Collection (ATCC Cell Line Number CRL-1674). See also, references: Jessop, N. W. and Hay, R. J., “Characteristics of two rat pancreatic exocrine cell lines derived from transplantable tumors,” In Vitro 16: 212, (1980); Cockell, M. et al., “Identification of a cell-specific DNA-binding activity that interacts with a transcriptional activator of genes expressed in the acinar pancreas,” Mol. Cell. Biol. 9: 2464-2476, (1989); Roux, E., et al. “The cell-specific transcription factor PTF1 contains two different subunits that interact with the DNA” Genes Dev. 3: 1613-1624, (1989); and, Hui, H., et al., “Glucagon-like peptide 1 induces differentiation of islet duodenal homeobox-1-positive pancreatic ductal cells into insulin-secreting cells,” Diabetes 50: 785-796 (2001).

[1148] Preparation of Cells

[1149] The RIN-M cell-line is grown in RPMI 1640 medium (Hyclone, #SH300027.01) with 10% fetal bovine serum (HyClone, #SH30088.03) and is subcultured every 6 to 8 days at a ratio of 1:3 to 1:6. The medium is changed every 3 to 4 days.

[1150] The ARIP (ATCC #CRL-1674) cell-line is grown in Ham's F12K medium (ATCC, #30-2004) with 2 mM L-glutamine adjusted to contain 1.5 g/L sodium bicarbonate and 10% fetal bovine serum. The ARIP cell-line is subcultured at a ratio of 1:3 to 1:6 twice per week. The medium is changed every 3 to 4 days.

[1151] Assay Protocol

[1152] The cells are seeded at 4000 cells/well in 96-well plates and cultured for 48 to 72 hours to 50% confluence. The cells are switched to serum-free media at 100 μL/well. After incubation for 48-72 hours, serum and/or the therapeutics of the subject invention (e.g., albumin fusion proteins of the invention and fragments and variants thereof) are added to the well. Incubation persists for an additional 36 hours. [³H]-Thymidine (5-20 Ci/mmol) (Amersham Pharmacia, #TRK120) is diluted to 1 microCuries/5 microliters. After the 36 hour incubation, 5 microliters is added per well for a further 24 hours. The reaction is terminated by washing the cells gently with cold Phosphate-Buffered Sal ine, “PBS”, once. The cells are then fixed with 100 microliters of 10% ice cold TCA for 15 min at 4° C. The PBS is removed and 200 microliters of 0.2 N NaOH is added. The plates are incubated for 1 hour at room temperature with shaking. The solution is transferred to a scintillation vial and 5 mL of scintillation fluid compatible with aqueous solutions is added and mixed vigorously. The vials are counted in a beta scintillation counter. As negative control, only buffer is used. As a positive control fetal calf serum is used.

### Example 15

### Assaying for Glycosuria

[1153] Glycosuria (i.e., excess sugar in the urine), can be readily assayed to provide an index of the disease state of diabetes mellitus. Excess urine in a patient sample as compared with a normal patient sample is symptomatic of IDDM and NIDDM. Efficacy of treatment of such a patient having IDDM and NIDDM is indicated by a resulting decrease in the amount of excess glucose in the urine. In a preferred embodiment for IDDM and NIDDM monitoring, urine samples from patients are assayed for the presence of glucose using techniques known in the art. Glycosuria in humans is defined by a urinary glucose concentration exceeding 100 mg per 100 ml. Excess sugar levels in those patients exhibiting glycosuria can be measured even more precisely by obtaining blood samples and assaying serum glucose.

### Example 16

### Assays Detecting Stimulation or Inhibition of B Cell Proliferation and Differentiation

[1154] Generation of functional humoral immune responses requires both soluble and cognate signaling between B-lineage cells and their microenvironment. Signals may impart a positive stimulus that allows a B-lineage cell to continue its programmed development, or a negative stimulus that instructs the cell to arrest its current developmental pathway. To date, numerous stimulatory and inhibitory signals have been found to influence B cell responsiveness including IL-2, IL-4, IL-5, IL-6, IL-7, IL-10, IL-13, IL-14 and IL-15. Interestingly, these signals are by themselves weak effectors but can, in combination with various co-stimulatory proteins, induce activation, proliferation, differentiation, homing, tolerance and death among B cell populations.

[1155] One of the best studied classes of B-cell co-stimulatory proteins is the TNF-superfamily. Within this family CD40, CD27, and CD30 along with their respective ligands CD154, CD70, and CD153 have been found to regulate a variety of immune responses. Assays which allow for the detection and/or observation of the proliferation and differentiation of these B-cell populations and their precursors are valuable tools in determining the effects various proteins may have on these B-cell populations in terms of proliferation and differentiation. Listed below are two assays designed to allow for the detection of the differentiation, proliferation, or inhibition of B-cell populations and their precursors.

[1156] In Vitro Assay-Albumin fusion proteins of the invention (including fusion proteins containing fragments or variants of Therapeutic proteins and/or albumin or fragments or variants of albumin) can be assessed for its ability to induce activation, proliferation, differentiation or inhibition and/or death in B-cell populations and their precursors. The activity of an albumin fusion protein of the invention on purified human tonsillar B cells, measured qualitatively over the dose range from 0.1 to 10,000 ng/mL, is assessed in a standard B-lymphocyte co-stimulation assay in which purified tonsillar B cells are cultured in the presence of either formalin-fixed Staphylococcus aureus Cowan I (SAC) or immobilized anti-human IgM antibody as the priming agent. Second signals such as IL-2 and IL-15 synergize with SAC and IgM crosslinking to elicit B cell proliferation as measured by tritiated-thymidine incorporation. Novel synergizing agents can be readily identified using this assay. The assay involves isolating human tonsillar B cells by magnetic bead (MACS) depletion of CD3-positive cells. The resulting cell population is greater than 95% B cells as assessed by expression of CD45R(B220).

[1157] Various dilutions of each sample are placed into individual wells of a 96-well plate to which are added 10⁵ B-cells suspended in culture medium (RPMI 1640 containing 10% FBS, 5×10⁻⁵M 2ME, 100 U/ml penicillin, 10 ug/ml streptomycin, and 10⁻⁵ dilution of SAC) in a total volume of 150 ul. Proliferation or inhibition is quantitated by a 20 h pulse (1 uCi/well) with 3H-thymidine (6.7 Ci/mM) beginning 72 h post factor addition. The positive and negative controls are IL2 and medium respectively.

[1158] In vivo Assay—BALB/c mice are injected (i.p.) twice per day with buffer only, or 2 mg/Kg of an albumin fusion protein of the invention (including fusion proteins containing fragments or variants of Therapeutic proteins and/or albumin or fragments or variants of albumin). Mice receive this treatment for 4 consecutive days, at which time they are sacrificed and various tissues and serum collected for analyses. Comparison of H&E sections from normal spleens and spleens treated with the albumin fusion protein of the invention identify the results of the activity of the fusion protein on spleen cells, such as the diffusion of peri-arterial lymphatic sheaths, and/or significant increases in the nucleated cellularity of the red pulp regions, which may indicate the activation of the differentiation and proliferation of B-cell populations. Immunohistochemical studies using a B cell marker, anti-CD45R(B220), are used to determine whether any physiological changes to splenic cells, such as splenic disorganization, are due to increased B-cell representation within loosely defined B-cell zones that infiltrate established T-cell regions.

[1159] Flow cytometric analyses of the spleens from mice treated with the albumin fusion protein is used to indicate whether the albumin fusion protein specifically increases the proportion of ThB+, CD45R(B220) dull B cells over that which is observed in control mice.

[1160] Likewise, a predicted consequence of increased mature B-cell representation in vivo is a relative increase in serum Ig titers. Accordingly, serum IgM and IgA levels are compared between buffer and fusion protein treated mice.

### Example 17

### T Cell Proliferation Assay

[1161] A CD3-induced proliferation assay is performed on PBMCs and is measured by the uptake of ³H-thymidine. The assay is performed as follows. Ninety-six well plates are coated with 100 μl/well of mAb to CD3 (HIT3a, Pharmingen) or isotype-matched control mAb (B33.1) overnight at 4 degrees C. (1 μg/ml in 0.05M bicarbonate buffer, pH 9.5), then washed three times with PBS. PBMC are isolated by F/H gradient centrifugation from human peripheral blood and added to quadruplicate wells (5×10⁴/well) of mAb coated plates in RPMI containing 10% FCS and P/S in the presence of varying concentrations of an albumin fusion protein of the invention (including fusion proteins containing fragments or variants of Therapeutic proteins and/or albumin or fragments or variants of albumin) (total volume 200 ul). Relevant protein buffer and medium alone are controls. After 48 hr. culture at 37 degrees C., plates are spun for 2 min. at 1000 rpm and 100 μl of supernatant is removed and stored −20 degrees C. for measurement of IL-2 (or other cytokines) if effect on proliferation is observed. Wells are supplemented with 100 ul of medium containing 0.5 uCi of ³H-thymidine and cultured at 37 degrees C. for 18-24 hr. Wells are harvested and incorporation of ³H-thymidine used as a measure of proliferation. Anti-CD3 alone is the positive control for proliferation. IL-2 (100 U/ml) is also used as a control which enhances proliferation. Control antibody which does not induce proliferation of T cells is used as the negative control for the effects of fusion proteins of the invention.

### Example 18

### Effect of Fusion Proteins of the Invention on the Expression of MHC Class II, Costimulatory and Adhesion Molecules and Cell Differentiation of Monocytes and Monocyte-Derived Human Dendritic Cells

[1162] Dendritic cells are generated by the expansion of proliferating precursors found in the peripheral blood: adherent PBMC or elutriated monocytic fractions are cultured for 7-10 days with GM-CSF (50 ng/ml) and IL-4 (20 ng/ml). These dendritic cells have the characteristic phenotype of immature cells (expression of CD1, CD80, CD86, CD40 and MHC class II antigens). Treatment with activating factors, such as TNF-α, causes a rapid change in surface phenotype (increased expression of MHC class I and II, costimulatory and adhesion molecules, downregulation of FCγRII, upregulation of CD83). These changes correlate with increased antigen-presenting capacity and with functional maturation of the dendritic cells.

[1163] FACS analysis of surface antigens is performed as follows. Cells are treated 1-3 days with increasing concentrations of an albumin fusion protein of the invention or LPS (positive control), washed with PBS containing 1% BSA and 0.02 mM sodium azide, and then incubated with 1:20 dilution of appropriate FITC- or PE-labeled monoclonal antibodies for 30 minutes at 4 degrees C. After an additional wash, the labeled cells are analyzed by flow cytometry on a FACScan (Becton Dickinson).

[1164] Effect on the production of cytokines. Cytokines generated by dendritic cells, in particular IL-12, are important in the initiation of T-cell dependent immune responses. IL-12 strongly influences the development of Th1 helper T-cell immune response, and induces cytotoxic T and NK cell function. An ELISA is used to measure the IL-12 release as follows. Dendritic cells (10⁶/ml) are treated with increasing concentrations of an albumin fusion protein of the invention for 24 hours. LPS (100 ng/ml) is added to the cell culture as positive control. Supernatants from the cell cultures are then collected and analyzed for IL-12 content using commercial ELISA kit (e.g., R & D Systems (Minneapolis, Minn.)). The standard protocols provided with the kits are used.

[1165] Effect on the expression of MHC Class II, costimulatory and adhesion molecules. Three major families of cell surface antigens can be identified on monocytes: adhesion molecules, molecules involved in antigen presentation, and Fc receptor. Modulation of the expression of MHC class II antigens and other costimulatory molecules, such as B7 and ICAM-1, may result in changes in the antigen presenting capacity of monocytes and ability to induce T cell activation. Increased expression of Fc receptors may correlate with improved monocyte cytotoxic activity, cytokine release and phagocytosis.

[1166] FACS analysis is used to examine the surface antigens as follows. Monocytes are treated 1-5 days with increasing concentrations of an albumin fusion protein of the invention or LPS (positive control), washed with PBS containing 1% BSA and 0.02 mM sodium azide, and then incubated with 1:20 dilution of appropriate FITC- or PE-labeled monoclonal antibodies for 30 minutes at 4 degrees C. After an additional wash, the labeled cells are analyzed by flow cytometry on a FACScan (Becton Dickinson).

[1167] Monocyte activation and/or increased survival. Assays for molecules that activate (or alternatively, inactivate) monocytes and/or increase monocyte survival (or alternatively, decrease monocyte survival) are known in the art and may routinely be applied to determine whether a molecule of the invention functions as an inhibitor or activator of monocytes. Albumin fusion proteins of the invention can be screened using the three assays described below. For each of these assays, Peripheral blood mononuclear cells (PBMC) are purified from single donor leukopacks (American Red Cross, Baltimore, Md.) by centrifugation through a Histopaque gradient (Sigma). Monocytes are isolated from PBMC by counterflow centrifugal elutriation.

[1168] Monocyte Survival Assay. Human peripheral blood monocytes progressively lose viability when cultured in absence of serum or other stimuli. Their death results from internally regulated processes (apoptosis). Addition to the culture of activating factors, such as TNF-alpha dramatically improves cell survival and prevents DNA fragmentation. Propidium iodide (PI) staining is used to measure apoptosis as follows. Monocytes are cultured for 48 hours in polypropylene tubes in serum-free medium (positive control), in the presence of 100 ng/ml TNF-alpha (negative control), and in the presence of varying concentrations of the fusion protein to be tested. Cells are suspended at a concentration of 2×10⁶/ml in PBS containing PI at a final concentration of 5 μg/ml, and then incubated at room temperature for 5 minutes before FACScan analysis. PI uptake has been demonstrated to correlate with DNA fragmentation in this experimental paradigm.

[1169] Effect on cytokine release. An important function of monocytes/macrophages is their regulatory activity on other cellular populations of the immune system through the release of cytokines after stimulation. An ELISA to measure cytokine release is performed as follows. Human monocytes are incubated at a density of 5×10⁵ cells/ml with increasing concentrations of an albumin fusion protein of the invention and under the same conditions, but in the absence of the fusion protein. For IL-12 production, the cells are primed overnight with IFN (100 U/ml) in the presence of the fusion protein. LPS (10 ng/ml) is then added. Conditioned media are collected after 24 h and kept frozen until use. Measurement of TNF-alpha, IL-10, MCP-1 and IL-8 is then performed using a commercially available ELISA kit (e.g., R & D Systems (Minneapolis, Minn.)) and applying the standard protocols provided with the kit.

[1170] Oxidative burst. Purified monocytes are plated in 96-w plate at 2-1×10⁵ cell/well. Increasing concentrations of an albumin fusion protein of the invention are added to the wells in a total volume of 0.2 ml culture medium (RPMI 1640+10% FCS, glutamine and antibiotics). After 3 days incubation, the plates are centrifuged and the medium is removed from the wells. To the macrophage monolayers, 0.2 ml per well of phenol red solution (140 mM NaCl, 10 mM potassium phosphate buffer pH 7.0, 5.5 mM dextrose, 0.56 mM phenol red and 19 U/ml of HRPO) is added, together with the stimulant (200 nM PMA). The plates are incubated at 37° C. for 2 hours and the reaction is stopped by adding 20 μl 1N NaOH per well. The absorbance is read at 610 nm. To calculate the amount of H₂O₂ produced by the macrophages, a standard curve of a H₂O₂ solution of known molarity is performed for each experiment.

### Example 19

### The Effect of Albumin Fusion Proteins of the Invention on the Growth of Vascular Endothelial Cells

[1171] On day 1, human umbilical vein endothelial cells (HUVEC) are seeded at 2-5×10⁴ cells/35 mm dish density in M199 medium containing 4% fetal bovine serum (FBS), 16 units/ml heparin, and 50 units/ml endothelial cell growth supplements (ECGS, Biotechnique, Inc.). On day 2, the medium is replaced with M199 containing 10% FBS, 8 units/ml heparin. An albumin fusion protein of the invention, and positive controls, such as VEGF and basic FGF (bFGF) are added, at varying concentrations. On days 4 and 6, the medium is replaced. On day 8, cell number is determined with a Coulter Counter.

[1172] An increase in the number of HUVEC cells indicates that the fusion protein may proliferate vascular endothelial cells, while a decrease in the number of HUVEC cells indicates that the fusion protein inhibits vascular endothelial cells.

### Example 20

### Rat Corneal Wound Healing Model

[1173] This animal model shows the effect of an albumin fusion protein of the invention on neovascularization. The experimental protocol includes:

[1174] Making a 1-1.5 mm long incision from the center of cornea into the stromal layer.

[1175] Inserting a spatula below the lip of the incision facing the outer corner of the eye.

[1176] Making a pocket (its base is 1-1.5 mm form the edge of the eye).

[1177] Positioning a pellet, containing 50 ng-5 ug of an albumin fusion protein of the invention, within the pocket.

[1178] Treatment with an albumin fusion protein of the invention can also be applied topically to the corneal wounds in a dosage range of 20 mg-500 mg (daily treatment for five days).

### Example 21

### Diabetic Mouse and Glucocorticoid-Impaired Wound Healing Models

[1179] Diabetic db+/db+ Mouse Model.

[1180] To demonstrate that an albumin fusion protein of the invention accelerates the healing process, the genetically diabetic mouse model of wound healing is used. The full thickness wound healing model in the db+/db+ mouse is a well characterized, clinically relevant and reproducible model of impaired wound healing. Healing of the diabetic wound is dependent on formation of granulation tissue and re-epithelialization rather than contraction (Gartner, M. H. et al., J. Surg. Res. 52:389 (1992); Greenhalgh, D. G. et al., Am. J. Pathol. 136:1235 (1990)).

[1181] The diabetic animals have many of the characteristic features observed in Type II diabetes mellitus. Homozygous (db+/db+) mice are obese in comparison to their normal heterozygous (db+/+m) littermates. Mutant diabetic (db+/db+) mice have a single autosomal recessive mutation on chromosome 4 (db+) (Coleman et al. Proc. Natl. Acad. Sci. USA 77:283-293 (1982)). Animals show polyphagia, polydipsia and polyuria. Mutant diabetic mice (db+/db+) have elevated blood glucose, increased or normal insulin levels, and suppressed cell-mediated immunity (Mandel et al., J. Immunol. 120:1375 (1978); Debray-Sachs, M. et al., Clin. Exp. Immunol. 51(1):1-7 (1983); Leiter et al., Am. J. of Pathol. 114:46-55 (1985)). Peripheral neuropathy, myocardial complications, and microvascular lesions, basement membrane thickening and glomerular filtration abnormalities have been described in these animals (Norido, F. et al., Exp. Neurol. 83(2):221-232 (1984); Robertson et al., Diabetes 29(1):60-67 (1980); Giacomelli et al., Lab Invest. 40(4):460-473 (1979); Coleman, D. L., Diabetes 31 (Suppl): 1-6 (1982)). These homozygous diabetic mice develop hyperglycemia that is resistant to insulin analogous to human type II diabetes (Mandel et al., J. Immunol. 120:1375-1377 (1978)).

[1182] The characteristics observed in these animals suggests that healing in this model may be similar to the healing observed in human diabetes (Greenhalgh, et al., Am. J. of Pathol. 136:1235-1246 (1990)).

[1183] Genetically diabetic female C57BL/KsJ (db+/db+) mice and their non-diabetic (db+/+m) heterozygous littermates are used in this study (Jackson Laboratories). The animals are purchased at 6 weeks of age and are 8 weeks old at the beginning of the study. Animals are individually housed and received food and water ad libitum. All manipulations are performed using aseptic techniques. The experiments are conducted according to the rules and guidelines of Human Genome Sciences, Inc. Institutional Animal Care and Use Committee and the Guidelines for the Care and Use of Laboratory Animals.

[1184] Wounding protocol is performed according to previously reported methods (Tsuboi, R. and Rifkin, D. B., J. Exp. Med. 172:245-251 (1990)). Briefly, on the day of wounding, animals are anesthetized with an intraperitoneal injection of Avertin (0.01 mg/mL), 2,2,2-tribromoethanol and 2-methyl-2-butanol dissolved in deionized water. The dorsal region of the animal is shaved and the skin washed with 70% ethanol solution and iodine. The surgical area is dried with sterile gauze prior to wounding. An 8 mm full-thickness wound is then created using a Keyes tissue punch. Immediately following wounding, the surrounding skin is gently stretched to eliminate wound expansion. The wounds are left open for the duration of the experiment. Application of the treatment is given topically for 5 consecutive days commencing on the day of wounding. Prior to treatment, wounds are gently cleansed with sterile saline and gauze sponges.

[1185] Wounds are visually examined and photographed at a fixed distance at the day of surgery and at two day intervals thereafter. Wound closure is determined by daily measurement on days 1-5 and on day 8. Wounds are measured horizontally and vertically using a calibrated Jameson caliper. Wounds are considered healed if granulation tissue is no longer visible and the wound is covered by a continuous epithelium.

[1186] An albumin fusion protein of the invention is administered using at a range different doses, from 4 mg to 500 mg per wound per day for 8 days in vehicle. Vehicle control groups received 50 mL of vehicle solution.

[1187] Animals are euthanized on day 8 with an intraperitoneal injection of sodium pentobarbital (300 mg/kg). The wounds and surrounding skin are then harvested for histology and immunohistochemistry. Tissue specimens are placed in 10% neutral buffered formalin in tissue cassettes between biopsy sponges for further processing.

[1188] Three groups of 10 animals each (5 diabetic and 5 non-diabetic controls) are evaluated: 1) Vehicle placebo control, 2) untreated group, and 3) treated group.

[1189] Wound closure is analyzed by measuring the area in the vertical and horizontal axis and obtaining the total square area of the wound. Contraction is then estimated by establishing the differences between the initial wound area (day 0) and that of post treatment (day 8). The wound area on day 1 is 64 mm², the corresponding size of the dermal punch. Calculations are made using the following formula:
[Open area on day 8]−[Open area on day 1]/[Open area on day 1] a.

[1190] Specimens are fixed in 10% buffered formalin and paraffin embedded blocks are sectioned perpendicular to the wound surface (5 mm) and cut using a Reichert-Jung microtome. Routine hematoxylin-eosin (H&E) staining is performed on cross-sections of bisected wounds. Histologic examination of the wounds are used to assess whether the healing process and the morphologic appearance of the repaired skin is altered by treatment with an albumin fusion protein of the invention. This assessment included verification of the presence of cell accumulation, inflammatory cells, capillaries, fibroblasts, re-epithelialization and epidermal maturity (Greenhalgh, D. G. et al., Am. J. Pathol. 136:1235 (1990)). A calibrated lens micrometer is used by a blinded observer.

[1191] Tissue sections are also stained immunohistochemically with a polyclonal rabbit anti-human keratin antibody using ABC Elite detection system. Human skin is used as a positive tissue control while non-immune IgG is used as a negative control. Keratinocyte growth is determined by evaluating the extent of reepithelialization of the wound using a calibrated lens micrometer.

[1192] Proliferating cell nuclear antigen/cyclin (PCNA) in skin specimens is demonstrated by using anti-PCNA antibody (1:50) with an ABC Elite detection system. Human colon cancer served as a positive tissue control and human brain tissue is used as a negative tissue control. Each specimen included a section with omission of the primary antibody and substitution with non-immune mouse IgG. Ranking of these sections is based on the extent of proliferation on a scale of 0-8, the lower side of the scale reflecting slight proliferation to the higher side reflecting intense proliferation.

[1193] Experimental data are analyzed using an unpaired t test. A p value of <0.05 is considered significant.

[1194] Steroid Impaired Rat Model

[1195] The inhibition of wound healing by steroids has been well documented in various in vitro and in vivo systems (Wahl, Glucocorticoids and Wound healing. In: Anti-Inflammatory Steroid Action: Basic and Clinical Aspects. 280-302 (1989); Wahl et al., J. Immunol. 115: 476-481 (1975); Werb et al., J. Exp. Med. 147:1684-1694 (1978)). Glucocorticoids retard wound healing by inhibiting angiogenesis, decreasing vascular permeability (Ebert et al., An. Intern. Med. 37:701-705 (1952)), fibroblast proliferation, and collagen synthesis (Beck et al., Growth Factors. 5: 295-304 (1991); Haynes et al., J. Clin. Invest. 61: 703-797 (1978)) and producing a transient reduction of circulating monocytes (Haynes et al., J. Clin. Invest. 61: 703-797 (1978); Wahl, “Glucocorticoids and wound healing”, In: Antiinflammatory Steroid Action: Basic and Clinical Aspects, Academic Press, New York, pp. 280-302 (1989)). The systemic administration of steroids to impaired wound healing is a well establish phenomenon in rats (Beck et al., Growth Factors. 5: 295-304 (1991); Haynes et al., J. Clin. Invest. 61: 703-797 (1978); Wahl, “Glucocorticoids and wound healing”, In: Antiinflammatory Steroid Action: Basic and Clinical Aspects, Academic Press, New York, pp. 280-302 (1989); Pierce et al., Proc. Natl. Acad. Sci. USA 86: 2229-2233 (1989)).

[1196] To demonstrate that an albumin fusion protein of the invention can accelerate the healing process, the effects of multiple topical applications of the fusion protein on full thickness excisional skin wounds in rats in which healing has been impaired by the systemic administration of methylprednisolone is assessed.

[1197] Young adult male Sprague Dawley rats weighing 250-300 g (Charles River Laboratories) are used in this example. The animals are purchased at 8 weeks of age and are 9 weeks old at the beginning of the study. The healing response of rats is impaired by the systemic administration of methylprednisolone (17 mg/kg/rat intramuscularly) at the time of wounding. Animals are individually housed and received food and water ad libitum. All manipulations are performed using aseptic techniques. This study is conducted according to the rules and guidelines of Human Genome Sciences, Inc. Institutional Animal Care and Use Committee and the Guidelines for the Care and Use of Laboratory Animals.

[1198] The wounding protocol is followed according to that described above. On the day of wounding, animals are anesthetized with an intramuscular injection of ketamine (50 mg/kg) and xylazine (5 mg/kg). The dorsal region of the animal is shaved and the skin washed with 70% ethanol and iodine solutions. The surgical area is dried with sterile gauze prior to wounding. An 8 mm full-thickness wound is created using a Keyes tissue punch. The wounds are left open for the duration of the experiment. Applications of the testing materials are given topically once a day for 7 consecutive days commencing on the day of wounding and subsequent to methylprednisolone administration. Prior to treatment, wounds are gently cleansed with sterile saline and gauze sponges.

[1199] Wounds are visually examined and photographed at a fixed distance at the day of wounding and at the end of treatment. Wound closure is determined by daily measurement on days 1-5 and on day 8. Wounds are measured horizontally and vertically using a calibrated Jameson caliper. Wounds are considered healed if granulation tissue is no longer visible and the wound is covered by a continuous epithelium.

[1200] The fusion protein of the invention is administered using at a range different doses, from 4 mg to 500 mg per wound per day for 8 days in vehicle. Vehicle control groups received 50 mL of vehicle solution.

[1201] Animals are euthanized on day 8 with an intraperitoneal injection of sodium pentobarbital (300 mg/kg). The wounds and surrounding skin are then harvested for histology. Tissue specimens are placed in 10% neutral buffered formalin in tissue cassettes between biopsy sponges for further processing.

[1202] Three groups of 10 animals each (5 with methylprednisolone and 5 without glucocorticoid) are evaluated: 1) Untreated group 2) Vehicle placebo control 3) treated groups.

[1203] Wound closure is analyzed by measuring the area in the vertical and horizontal axis and obtaining the total area of the wound. Closure is then estimated by establishing the differences between the initial wound area (day 0) and that of post treatment (day 8). The wound area on day 1 is 64 mm², the corresponding size of the dermal punch. Calculations are made using the following formula:
[Open area on day 8]−[Open area on day 1]/[Open area on day 1] b.

[1204] Specimens are fixed in 10% buffered formalin and paraffin embedded blocks are sectioned perpendicular to the wound surface (5 mm) and cut using an Olympus microtome. Routine hematoxylin-eosin (H&E) staining is performed on cross-sections of bisected wounds. Histologic examination of the wounds allows assessment of whether the healing process and the morphologic appearance of the repaired skin is improved by treatment with an albumin fusion protein of the invention. A calibrated lens micrometer is used by a blinded observer to determine the distance of the wound gap.

[1205] Experimental data are analyzed using an unpaired t test. A p value of <0.05 is considered significant.

### Example 22

### Lymphedema Animal Model

[1206] The purpose of this experimental approach is to create an appropriate and consistent lymphedema model for testing the therapeutic effects of an albumin fusion protein of the invention in lymphangiogenesis and re-establishment of the lymphatic circulatory system in the rat hind limb. Effectiveness is measured by swelling volume of the affected limb, quantification of the amount of lymphatic vasculature, total blood plasma protein, and histopathology. Acute lymphedema is observed for 7-10 days. Perhaps more importantly, the chronic progress of the edema is followed for up to 3-4 weeks.

[1207] Prior to beginning surgery, blood sample is drawn for protein concentration analysis. Male rats weighing approximately ˜350 g are dosed with Pentobarbital. Subsequently, the right legs are shaved from knee to hip. The shaved area is swabbed with gauze soaked in 70% EtOH. Blood is drawn for serum total protein testing. Circumference and volumetric measurements are made prior to injecting dye into paws after marking 2 measurement levels (0.5 cm above heel, at mid-pt of dorsal paw). The intradermal dorsum of both right and left paws are injected with 0.05 ml of 1% Evan's Blue. Circumference and volumetric measurements are then made following injection of dye into paws.

[1208] Using the knee joint as a landmark, a mid-leg inguinal incision is made circumferentially allowing the femoral vessels to be located. Forceps and hemostats are used to dissect and separate the skin flaps. After locating the femoral vessels, the lymphatic vessel that runs along side and underneath the vessel(s) is located. The main lymphatic vessels in this area are then electrically coagulated or suture ligated.

[1209] Using a microscope, muscles in back of the leg (near the semitendinosis and adductors) are bluntly dissected. The popliteal lymph node is then located. The 2 proximal and 2 distal lymphatic vessels and distal blood supply of the popliteal node are then ligated by suturing. The popliteal lymph node, and any accompanying adipose tissue, is then removed by cutting connective tissues.

[1210] Care is taken to control any mild bleeding resulting from this procedure. After lymphatics are occluded, the skin flaps are sealed by using liquid skin (Vetbond) (AJ Buck). The separated skin edges are sealed to the underlying muscle tissue while leaving a gap of ˜0.5 cm around the leg. Skin also may be anchored by suturing to underlying muscle when necessary.

[1211] To avoid infection, animals are housed individually with mesh (no bedding). Recovering animals are checked daily through the optimal edematous peak, which typically occurred by day 5-7. The plateau edematous peak are then observed. To evaluate the intensity of the lymphedema, the circumference and volumes of 2 designated places on each paw before operation and daily for 7 days are measured. The effect of plasma proteins on lymphedema is determined and whether protein analysis is a useful testing perimeter is also investigated. The weights of both control and edematous limbs are evaluated at 2 places. Analysis is performed in a blind manner.

[1212] Circumference Measurements: Under brief gas anesthetic to prevent limb movement, a cloth tape is used to measure limb circumference. Measurements are done at the ankle bone and dorsal paw by 2 different people and those 2 readings are averaged. Readings are taken from both control and edematous limbs.

[1213] Volumetric Measurements: On the day of surgery, animals are anesthetized with Pentobarbital and are tested prior to surgery. For daily volumetrics animals are under brief halothane anesthetic (rapid immobilization and quick recovery), and both legs are shaved and equally marked using waterproof marker on legs. Legs are first dipped in water, then dipped into instrument to each marked level then measured by Buxco edema software (Chen/Victor). Data is recorded by one person, while the other is dipping the limb to marked area.

[1214] Blood-plasma protein measurements: Blood is drawn, spun, and serum separated prior to surgery and then at conclusion for total protein and Ca2⁺ comparison.

[1215] Limb Weight Comparison: After drawing blood, the animal is prepared for tissue collection. The limbs are amputated using a quillitine, then both experimental and control legs are cut at the ligature and weighed. A second weighing is done as the tibio-cacaneal joint is disarticulated and the foot is weighed.

[1216] Histological Preparations: The transverse muscle located behind the knee (popliteal) area is dissected and arranged in a metal mold, filled with freezeGel, dipped into cold methylbutane, placed into labeled sample bags at −80 EC until sectioning. Upon sectioning, the muscle is observed under fluorescent microscopy for lymphatics.

### Example 23

### Suppression of TNF Alpha-Induced Adhesion Molecule Expression by an Albumin Fusion Protein of the Invention

[1217] The recruitment of lymphocytes to areas of inflammation and angiogenesis involves specific receptor-ligand interactions between cell surface adhesion molecules (CAMs) on lymphocytes and the vascular endothelium. The adhesion process, in both normal and pathological settings, follows a multi-step cascade that involves intercellular adhesion molecule-1 (ICAM-1), vascular cell adhesion molecule-1 (VCAM-1), and endothelial leukocyte adhesion molecule-1 (E-selectin) expression on endothelial cells (EC). The expression of these molecules and others on the vascular endothelium determines the efficiency with which leukocytes may adhere to the local vasculature and extravasate into the local tissue during the development of an inflammatory response. The local concentration of cytokines and growth factor participate in the modulation of the expression of these CAMs.

[1218] Tumor necrosis factor alpha (TNF-a), a potent proinflammatory cytokine, is a stimulator of all three CAMs on endothelial cells and may be involved in a wide variety of inflammatory responses, often resulting in a pathological outcome.

[1219] The potential of an albumin fusion protein of the invention to mediate a suppression of TNF-a induced CAM expression can be examined. A modified ELISA assay which uses ECs as a solid phase absorbent is employed to measure the amount of CAM expression on TNF-a treated ECs when co-stimulated with a member of the FGF family of proteins.

[1220] To perform the experiment, human umbilical vein endothelial cell (HUVEC) cultures are obtained from pooled cord harvests and maintained in growth medium (EGM-2; Clonetics, San Diego, Calif.) supplemented with 10% FCS and 1% penicillin/streptomycin in a 37 degree C. humidified incubator containing 5% CO₂. HUVECs are seeded in 96-well plates at concentrations of 1×10⁴ cells/well in EGM medium at 37 degree C. for 18-24 hrs or until confluent. The monolayers are subsequently washed 3 times with a serum-free solution of RPMI-1640 supplemented with 100 U/ml penicillin and 100 mg/ml streptomycin, and treated with a given cytokine and/or growth factor(s) for 24 h at 37 degree C. Following incubation, the cells are then evaluated for CAM expression.

[1221] Human Umbilical Vein Endothelial cells (HUVECs) are grown in a standard 96 well plate to confluence. Growth medium is removed from the cells and replaced with 90 ul of 199 Medium (10% FBS). Samples for testing and positive or negative controls are added to the plate in triplicate (in 10 ul volumes). Plates are incubated at 37 degree C. for either 5 h (selectin and integrin expression) or 24 h (integrin expression only). Plates are aspirated to remove medium and 100 μl of 0.1% paraformaldehyde-PBS (with Ca++ and Mg++) is added to each well. Plates are held at 4° C. for 30 min.

[1222] Fixative is then removed from the wells and wells are washed 1× with PBS (+Ca,Mg)+0.5% BSA and drained. Do not allow the wells to dry. Add 10 μl of diluted primary antibody to the test and control wells. Anti-ICAM-1-Biotin, Anti-VCAM-1-Biotin and Anti-E-selectin-Biotin are used at a concentration of 10 μg/ml (1:10 dilution of 0.1 mg/ml stock antibody). Cells are incubated at 37° C. for 30 min. in a humidified environment. Wells are washed X3 with PBS (+Ca,Mg)+0.5% BSA.

[1223] Then add 20 μl of diluted ExtrAvidin-Alkaline Phosphotase (1:5,000 dilution) to each well and incubated at 37° C. for 30 min. Wells are washed X3 with PBS (+Ca,Mg)+0.5% BSA. 1 tablet of p-Nitrophenol Phosphate pNPP is dissolved in 5 ml of glycine buffer (pH 10.4). 100 μl of pNPP substrate in glycine buffer is added to each test well. Standard wells in triplicate are prepared from the working dilution of the ExtrAvidin-Alkaline Phosphotase in glycine buffer: 1:5,000 (10⁰)>10⁻⁵>10⁻¹>10^{-1.5}. 5 μl of each dilution is added to triplicate wells and the resulting AP content in each well is 5.50 ng, 1.74 ng, 0.55 ng, 0.18 ng. 100 μl of pNNP reagent must then be added to each of the standard wells. The plate must be incubated at 37° C. for 4 h. A volume of 50 μl of 3M NaOH is added to all wells. The results are quantified on a plate reader at 405 nm. The background subtraction option is used on blank wells filled with glycine buffer only. The template is set up to indicate the concentration of AP-conjugate in each standard well [5.50 ng; 1.74 ng; 0.55 ng; 0.18 ng]. Results are indicated as amount of bound AP-conjugate in each sample.

### Example 24

### Construction of GAS Reporter Construct

[1224] One signal transduction pathway involved in the differentiation and proliferation of cells is called the Jaks-STATs pathway. Activated proteins in the Jaks-STATs pathway bind to gamma activation site “GAS” elements or interferon-sensitive responsive element (“ISRE”), located in the promoter of many genes. The binding of a protein to these elements alter the expression of the associated gene.

[1225] GAS and ISRE elements are recognized by a class of transcription factors called Signal Transducers and Activators of Transcription, or “STATs.” There are six members of the STATs family. Stat1 and Stat3 are present in many cell types, as is Stat2 (as response to IFN-alpha is widespread). Stat4 is more restricted and is not in many cell types though it has been found in T helper class I, cells after treatment with IL-12. Stat5 was originally called mammary growth factor, but has been found at higher concentrations in other cells including myeloid cells. It can be activated in tissue culture cells by many cytokines.

[1226] The STATs are activated to translocate from the cytoplasm to the nucleus upon tyrosine phosphorylation by a set of kinases known as the Janus Kinase (“Jaks”) family. Jaks represent a distinct family of soluble tyrosine kinases and include Tyk2, Jak1, Jak2, and Jak3. These kinases display significant sequence similarity and are generally catalytically inactive in resting cells.

[1227] The Jaks are activated by a wide range of receptors summarized in the Table below. (Adapted from review by Schidler and Darnell, Ann. Rev. Biochem. 64:621-51 (1995)). A cytokine receptor family, capable of activating Jaks, is divided into two groups: (a) Class 1 includes receptors for IL-2, IL-3, IL-4, IL-6, IL-7, IL-9, IL-11, IL-12, IL-15, Epo, PRL, GH, G-CSF, GM-CSF, LIF, CNTF, and thrombopoietin; and (b) Class 2 includes IFN-a, IFN-g, and IL-10. The Class 1 receptors share a conserved cysteine motif (a set of four conserved cysteines and one tryptophan) and a WSXWS motif (a membrane proximal region encoding Trp-Ser-Xaa-Trp-Ser (SEQ ID NO:53)).

[1228] Thus, on binding of a ligand to a receptor, Jaks are activated, which in turn activate STATs, which then translocate and bind to GAS elements. This entire process is encompassed in the Jaks-STATs signal transduction pathway. Therefore, activation of the Jaks-STATs pathway, reflected by the binding of the GAS or the ISRE element, can be used to indicate proteins involved in the proliferation and differentiation of cells. For example, growth factors and cytokines are known to activate the Jaks-STATs pathway (See Table 5, below). Thus, by using GAS elements linked to reporter molecules, activators of the Jaks-STATs pathway can be identified.

TABLE 5

| | JAKs | | | | | |
|---|---|---|---|---|---|---|
| Ligand | tyk2 | Jak1 | Jak2 | Jak3 | STATS | GAS(elements) or ISRE |
| IFN family | | | | | | |
| IFN-a/B | + | + | − | − | 1, 2, 3 | ISRE |
| IFN-g | | + | + | − | 1 | GAS (IRF1 > Lys6 > IFP) |
| Il-10 | + | ? | ? | − | 1, 3 | |
| gp130 family | | | | | | |
| IL-6 (Pleiotropic) | + | + | + | ? | 1, 3 | GAS(IRF1 > Lys6 > IFP) |
| Il-11 (Pleiotropic) | ? | + | ? | ? | 1, 3 | |
| OnM (Pleiotropic) | ? | + | + | ? | 1, 3 | |
| LIF (Pleiotropic) | ? | + | + | ? | 1, 3 | |
| CNTF (Pleiotropic) | −/+ | + | + | ? | 1, 3 | |
| G-CSF (Pleiotropic) | ? | + | ? | ? | 1, 3 | |
| IL-12 (Pleiotropic) | + | − | + | + | 1, 3 | |
| g-C family | | | | | | |
| IL-2 (lymphocytes) | − | + | − | + | 1, 3, 5 | GAS |
| IL-4 (lymph/myeloid) | − | + | − | + | 6 | GAS(IRF1 = IFP >> Ly6)(IgH) |
| IL-7 (lymphocytes) | − | + | − | + | 5 | GAS |
| IL-9 (lymphocytes) | − | + | − | + | 5 | GAS |
| IL-13 (lymphocyte) | − | + | ? | ? | 6 | GAS |
| IL-15 | ? | + | ? | + | 5 | GAS |
| gp140 family | | | | | | |
| IL-3 (myeloid) | − | − | + | − | 5 | GAS(IRF1 > IFP >> Ly6) |
| IL-5 (myeloid) | − | − | + | − | 5 | GAS |
| GM-CSF (myeloid) | − | − | + | − | 5 | GAS |
| Growth hormone family | | | | | | |
| GH | ? | − | + | − | 5 | |
| PRL | ? | +/− | + | − | 1, 3, 5 | |
| EPO | ? | − | + | − | 5 | GAS (B- |
| | | | | | | CAS > IRF1 = IFP >> Ly6) |
| Receptor Tyrosine Kinases | | | | | | |
| EGF | ? | + | + | − | 1, 3 | GAS (IRF1) |
| PDGF | ? | + | + | − | 1, 3 | |
| CSF-1 | ? | + | + | − | 1, 3 | GAS(not IRF1) |

[1229] To construct a synthetic GAS containing promoter element, which is used in the Biological Assays described in Examples 27-29, a PCR based strategy is employed to generate a GAS-SV40 promoter sequence. The 5′ primer contains four tandem copies of the GAS binding site found in the IRF1 promoter and previously demonstrated to bind STATs upon induction with a range of cytokines (Rothman et al., Immunity 1:457-468 (1994)), although other GAS or ISRE elements can be used instead. The 5′ primer also contains 18 bp of sequence complementary to the SV40 early promoter sequence and is flanked with an XhoI site. The sequence of the 5′ primer is:

(SEQ 1D NO: 54)

5′:GCGCCTCGAGATTTCCCCGAAATCTAGATTTCCCCGAAATGATTTCC
CCGAAATGATTTCCCCGAAATATCTGCCATCTCAATTAG:3′

[1230] The downstream primer is complementary to the SV40 promoter and is flanked with a Hind III site: 5′:GCGGCAAGCTTTTTGCAAAGCCTAGGC:3′ (SEQ ID NO:55)

[1231] PCR amplification is performed using the SV40 promoter template present in the B-gal:promoter plasmid obtained from Clontech. The resulting PCR fragment is digested with XhoI/Hind III and subcloned into BLSK2-. (Stratagene.) Sequencing with forward and reverse primers confirms that the insert contains the following sequence:

(SEQ ID NO: 56)

5′:CTCGAGATTTCCCCGAAATCTAGATTTCCCCGAAATGATTTCCCCGA
AATGATTTCCCCGAAATATCTGCCATCTCAATTAGTCAGCAACCATAGTC
CCGCCCCTAACTCCGCCCATCCCGCCCCTAACTCCGCCCAGTTCCGCCCA
TTCTCCGCCCCATGGCTGACTAATTTTTTTTATTTATGCAGAGGCCGAGG
CCGCCTCGGCCTCTGAGCTATTCCAGAAGTAGTGAGGAGGCTTTTTTGGA
GGCCTAGGCTTTTGCAAAAAGCTT:3′

[1232] With this GAS promoter element linked to the SV40 promoter, a GAS:SEAP2 reporter construct is next engineered. Here, the reporter molecule is a secreted alkaline phosphatase, or “SEAP.” Clearly, however, any reporter molecule can be instead of SEAP, in this or in any of the other Examples. Well known reporter molecules that can be used instead of SEAP include chloramphenicol acetyltransferase (CAT), luciferase, alkaline phosphatase, B-galactosidase, green fluorescent protein (GFP), or any protein detectable by an antibody.

[1233] The above sequence confirmed synthetic GAS-SV40 promoter element is subcloned into the pSEAP-Promoter vector obtained from Clontech using HindIII and XhoI, effectively replacing the SV40 promoter with the amplified GAS:SV40 promoter element, to create the GAS-SEAP vector. However, this vector does not contain a neomycin resistance gene, and therefore, is not preferred for mammalian expression systems.

[1234] Thus, in order to generate mammalian stable cell lines expressing the GAS-SEAP reporter, the GAS-SEAP cassette is removed from the GAS-SEAP vector using SalI and NotI, and inserted into a backbone vector containing the neomycin resistance gene, such as pGFP-1 (Clontech), using these restriction sites in the multiple cloning site, to create the GAS-SEAP/Neo vector. Once this vector is transfected into mammalian cells, this vector can then be used as a reporter molecule for GAS binding as described in Examples 27-29.

[1235] Other constructs can be made using the above description and replacing GAS with a different promoter sequence. For example, construction of reporter molecules containing EGR and NF-KB promoter sequences are described in Examples 27-31. However, many other promoters can be substituted using the protocols described in these Examples. For instance, SRE, IL-2, NFAT, or Osteocalcin promoters can be substituted, alone or in combination (e.g., GAS/NF-KB/EGR, GAS/NF-KB, Il-2/NFAT, or NF-KB/GAS). Similarly, other cell lines can be used to test reporter construct activity, such as HELA (epithelial), HUVEC (endothelial), Reh (B-cell), Saos-2 (osteoblast), HUVAC (aortic), or Cardiomyocyte.

### Example 25

### Assay for SEAP Activity

[1236] As a reporter molecule for the assays described in examples disclosed herein, SEAP activity is assayed using the Tropix Phospho-light Kit (Cat. BP-400) according to the following general procedure. The Tropix Phospho-light Kit supplies the Dilution, Assay, and Reaction Buffers used below.

[1237] Prime a dispenser with the 2.5× Dilution Buffer and dispense 15 ul of 2.5× dilution buffer into Optiplates containing 35 ul of a solution containing an albumin fusion protein of the invention. Seal the plates with a plastic sealer and incubate at 65 degree C. for 30 min. Separate the Optiplates to avoid uneven heating.

[1238] Cool the samples to room temperature for 15 minutes. Empty the dispenser and prime with the Assay Buffer. Add 50 ml Assay Buffer and incubate at room temperature 5 min. Empty the dispenser and prime with the Reaction Buffer (see the Table below). Add 50 ul Reaction Buffer and incubate at room temperature for 20 minutes. Since the intensity of the chemiluminescent signal is time dependent, and it takes about 10 minutes to read 5 plates on a luminometer, thus one should treat 5 plates at each time and start the second set 10 minutes later.

[1239] Read the relative light unit in the luminometer. Set H12 as blank, and print the results. An increase in chemiluminescence indicates reporter activity.

TABLE 6

| | Rxn buffer | |
|---|---|---|
| # of plates | diluent (ml) | CSPD (ml) |
| 10 | 60 | 3 |
| 11 | 65 | 3.25 |
| 12 | 70 | 3.5 |
| 13 | 75 | 3.75 |
| 14 | 80 | 4 |
| 15 | 85 | 4.25 |
| 16 | 90 | 4.5 |
| 17 | 95 | 4.75 |
| 18 | 100 | 5 |
| 19 | 105 | 5.25 |
| 20 | 110 | 5.5 |
| 21 | 115 | 5.75 |
| 22 | 120 | 6 |
| 23 | 125 | 6.25 |
| 24 | 130 | 6.5 |
| 25 | 135 | 6.75 |
| 26 | 140 | 7 |
| 27 | 145 | 7.25 |
| 28 | 150 | 7.5 |
| 29 | 155 | 7.75 |
| 30 | 160 | 8 |
| 31 | 165 | 8.25 |
| 32 | 170 | 8.5 |
| 33 | 175 | 8.75 |
| 34 | 180 | 9 |
| 35 | 185 | 9.25 |
| 36 | 190 | 9.5 |
| 37 | 195 | 9.75 |
| 38 | 200 | 10 |
| 39 | 205 | 10.25 |
| 40 | 210 | 10.5 |
| 41 | 215 | 10.75 |
| 42 | 220 | 11 |
| 43 | 225 | 11.25 |
| 44 | 230 | 11.5 |
| 45 | 235 | 11.75 |
| 46 | 240 | 12 |
| 47 | 245 | 12.25 |
| 48 | 250 | 12.5 |
| 49 | 255 | 12.75 |
| 50 | 260 | 13 |

### Example 26

### Assay Identifying Neuronal Activity

[1240] When cells undergo differentiation and proliferation, a group of genes are activated through many different signal transduction pathways. One of these genes, EGR1 (early growth response gene 1), is induced in various tissues and cell types upon activation. The promoter of EGR1 is responsible for such induction. Using the EGR1 promoter linked to reporter molecules, the ability of fusion proteins of the invention to activate cells can be assessed.

[1241] Particularly, the following protocol is used to assess neuronal activity in PC12 cell lines. PC12 cells (rat phenochromocytoma cells) are known to proliferate and/or differentiate by activation with a number of mitogens, such as TPA (tetradecanoyl phorbol acetate), NGF (nerve growth factor), and EGF (epidermal growth factor). The EGR1 gene expression is activated during this treatment. Thus, by stably transfecting PC12 cells with a construct containing an EGR promoter linked to SEAP reporter, activation of PC12 cells by an albumin fusion protein of the present invention can be assessed.

[1242] The EGR/SEAP reporter construct can be assembled by the following protocol. The EGR-1 promoter sequence (−633 to +1)(Sakamoto K et al., Oncogene 6:867-871 (1991)) can be PCR amplified from human genomic DNA using the following primers:

First primer:

(SEQ ID NO: 57)

5′ GCGCTCGAGGGATGACAGCGATAGAACCCCGG-3′
Second primer:

(SEQ ID NO: 58)

5′ GCGAAGCTTCGCGACTCCCCGGATCCGCCTC-3′

[1243] Using the GAS:SEAP/Neo vector produced in Example 24, EGR1 amplified product can then be inserted into this vector. Linearize the GAS:SEAP/Neo vector using restriction enzymes XhoI/HindIII, removing the GAS/SV40 stuffer. Restrict the EGR1 amplified product with these same enzymes. Ligate the vector and the EGR1 promoter.

[1244] To prepare 96 well-plates for cell culture, two mls of a coating solution (1:30 dilution of collagen type I (Upstate Biotech Inc. Cat#08-115) in 30% ethanol (filter sterilized)) is added per one 10 cm plate or 50 ml per well of the 96-well plate, and allowed to air dry for 2 hr.

[1245] PC12 cells are routinely grown in RPMI-1640 medium (Bio Whittaker) containing 10% horse serum (JRH BIOSCIENCES, Cat. # 12449-78P), 5% heat-inactivated fetal bovine serum (FBS) supplemented with 100 units/ml penicillin and 100 ug/ml streptomycin on a precoated 10 cm tissue culture dish. One to four split is done every three to four days. Cells are removed from the plates by scraping and resuspended with pipetting up and down for more than 15 times.

[1246] Transfect the EGR/SEAP/Neo construct into PC12 using techniques known in the art. EGR-SEAP/PC12 stable cells are obtained by growing the cells in 300 ug/ml G418. The G418-free medium is used for routine growth but every one to two months, the cells should be re-grown in 300 ug/ml G418 for couple of passages.

[1247] To assay for neuronal activity, a 10 cm plate with cells around 70 to 80% confluent is screened by removing the old medium. Wash the cells once with PBS (Phosphate buffered saline). Then starve the cells in low serum medium (RPMI-1640 containing 1% horse serum and 0.5% FBS with antibiotics) overnight.

[1248] The next morning, remove the medium and wash the cells with PBS. Scrape off the cells from the plate, suspend the cells well in 2 ml low serum medium. Count the cell number and add more low serum medium to reach final cell density as 5×10⁵ cells/ml.

[1249] Add 200 ul of the cell suspension to each well of 96-well plate (equivalent to 1×10⁵ cells/well). Add a series of different concentrations of an albumin fusion protein of the invention, 37 degree C. for 48 to 72 hr. As a positive control, a growth factor known to activate PC12 cells through EGR can be used, such as 50 ng/ul of Neuronal Growth Factor (NGF). Over fifty-fold induction of SEAP is typically seen in the positive control wells. SEAP assay may be routinely performed using techniques known in the art and/or as described in Example 25.

### Example 27

### Assay for T-cell Activity

[1250] The following protocol is used to assess T-cell activity by identifying factors, and determining whether an albumin fusion protein of the invention proliferates and/or differentiates T-cells. T-cell activity is assessed using the GAS/SEAP/Neo construct produced in Example 24. Thus, factors that increase SEAP activity indicate the ability to activate the Jaks-STATS signal transduction pathway. The T-cell used in this assay is Jurkat T-cells (ATCC Accession No. TIB-152), although Molt-3 cells (ATCC Accession No. CRL-1552) and Molt-4 cells (ATCC Accession No. CRL-1582) cells can also be used.

[1251] Jurkat T-cells are lymphoblastic CD4+ Th1 helper cells. In order to generate stable cell lines, approximately 2 million Jurkat cells are transfected with the GAS-SEAP/neo vector using DMRIE-C (Life Technologies)(transfection procedure described below). The transfected cells are seeded to a density of approximately 20,000 cells per well and transfectants resistant to 1 mg/ml genticin selected. Resistant colonies are expanded and then tested for their response to increasing concentrations of interferon gamma. The dose response of a selected clone is demonstrated.

[1252] Specifically, the following protocol will yield sufficient cells for 75 wells containing 200 ul of cells. Thus, it is either scaled up, or performed in multiple to generate sufficient cells for multiple 96 well plates. Jurkat cells are maintained in RPMI+10% serum with 1% Pen-Strep. Combine 2.5 mls of OPTI-MEM (Life Technologies) with 10 ug of plasmid DNA in a T25 flask. Add 2.5 ml OPTI-MEM containing 50 ul of DMRIE-C and incubate at room temperature for 15-45 mins.

[1253] During the incubation period, count cell concentration, spin down the required number of cells (10⁷ per transfection), and resuspend in OPTI-MEM to a final concentration of 10⁷ cells/ml. Then add 1 ml of 1×10⁷ cells in OPTI-MEM to T25 flask and incubate at 37 degree C. for 6 hrs. After the incubation, add 10 ml of RPMI+15% serum.

[1254] The Jurkat:GAS-SEAP stable reporter lines are maintained in RPMI+10% serum, 1 mg/ml Genticin, and 1% Pen-Strep. These cells are treated with varying concentrations of one or more fusion proteins of the present invention.

[1255] On the day of treatment with the fusion protein, the cells should be washed and resuspended in fresh RPMI+10% serum to a density of 500,000 cells per ml. The exact number of cells required will depend on the number of fusion proteins and the number of different concentrations of fusion proteins being screened. For one 96 well plate, approximately 10 million cells (for 10 plates, 100 million cells) are required.

[1256] The well dishes containing Jurkat cells treated with the fusion protein are placed in an incubator for 48 hrs (note: this time is variable between 48-72 hrs). 35 ul samples from each well are then transferred to an opaque 96 well plate using a 12 channel pipette. The opaque plates should be covered (using cellophane covers) and stored at −20 degree C. until SEAP assays are performed according to Example 25. The plates containing the remaining treated cells are placed at 4 degree C. and serve as a source of material for repeating the assay on a specific well if desired.

[1257] As a positive control, 100 Unit/ml interferon gamma can be used which is known to activate Jurkat T cells. Over 30 fold induction is typically observed in the positive control wells.

[1258] The above protocol may be used in the generation of both transient, as well as, stable transfected cells, which would be apparent to those of skill in the art.

### Example 28

### Assay for T-Cell Activity

[1259] NF-KB (Nuclear Factor KB) is a transcription factor activated by a wide variety of agents including the inflammatory cytokines IL-1 and TNF, CD30 and CD40, lymphotoxin-alpha and lymphotoxin-beta, by exposure to LPS or thrombin, and by expression of certain viral gene products. As a transcription factor, NF-KB regulates the expression of genes involved in immune cell activation, control of apoptosis (NF-KB appears to shield cells from apoptosis), B and T-cell development, anti-viral and antimicrobial responses, and multiple stress responses.

[1260] In non-stimulated conditions, NF-KB is retained in the cytoplasm with I-KB (Inhibitor KB). However, upon stimulation, I-KB is phosphorylated and degraded, causing NF-KB to shuttle to the nucleus, thereby activating transcription of target genes. Target genes activated by NF-KB include IL-2, IL-6, GM-CSF, ICAM-1 and class 1 MHC.

[1261] Due to its central role and ability to respond to a range of stimuli, reporter constructs utilizing the NF-KB promoter element are used to screen the fusion protein. Activators or inhibitors of NF-KB would be useful in treating, preventing, and/or diagnosing diseases. For example, inhibitors of NF-KB could be used to treat those diseases related to the acute or chronic activation of NF-KB, such as rheumatoid arthritis.

[1262] To construct a vector containing the NF-KB promoter element, a PCR based strategy is employed. The upstream primer contains four tandem copies of the NF-KB binding site (GGGGACTTTCCC) (SEQ ID NO:59), 18 bp of sequence complementary to the 5′ end of the SV40 early promoter sequence, and is flanked with an XhoI site:

(SEQ ID NO: 60)

5′:GCGGCCTCGAGGGGACTTTCCCGGGGACTTTCCGGGGACTTTCCGGG
ACTTTCCATCCTGCCATCTCAATTAG:3′

[1263] The downstream primer is complementary to the 3′ end of the SV40 promoter and is flanked with a Hind III site:

| | |
|---|---|
| 5′:GCGGCAAGCTTTTTGCAAAGCCTAGGC:3′ | (SEQ ID NO: 55) |

[1264] PCR amplification is performed using the SV40 promoter template present in the pB-gal:promoter plasmid obtained from Clontech. The resulting PCR fragment is digested with XhoI and Hind III and subcloned into BLSK2-. (Stratagene) Sequencing with the T7 and T3 primers confirms the insert contains the following sequence:

(SEQ ID NO: 61)

5′:CTCGAGGGGACTTTCCCGGGGACTTTCCGGGGACTTTCCGGGACTTT
CCATCTGCCATCTCAATTAGTCAGCAACCATAGTCCCGCCCCTAACTCCG
CCCATCCCGCCCCTAACTCCGCCCAGTTCCGCCCATTCTCCGCCCCATGG
CTGACTAATTTTTTTTATTTATGCAGAGGCCGAGGCCGCCTCGGCCTCTG
AGCTATTCCAGAAGTAGTGAGGAGGCTTTTTTGGAGGCCTAGGCTTTTGC
AAAAAGCTT:3′

[1265] Next, replace the SV40 minimal promoter element present in the pSEAP2-promoter plasmid (Clontech) with this NF-KB/SV40 fragment using XhoI and HindIII. However, this vector does not contain a neomycin resistance gene, and therefore, is not preferred for mammalian expression systems.

[1266] In order to generate stable mammalian cell lines, the NF-KB/SV40/SEAP cassette is removed from the above NF-KB/SEAP vector using restriction enzymes SalI and NotI, and inserted into a vector containing neomycin resistance. Particularly, the NF-KB/SV40/SEAP cassette was inserted into pGFP-1 (Clontech), replacing the GFP gene, after restricting pGFP-1 with SalI and NotI.

[1267] Once NF-KB/SV40/SEAP/Neo vector is created, stable Jurkat T-cells are created and maintained according to the protocol described in Example 25. Similarly, the method for assaying fusion proteins with these stable Jurkat T-cells is also described in Example 25. As a positive control, exogenous TNF alpha (0.1, 1, 10 ng) is added to wells H9, H10, and H11, with a 5-10 fold activation typically observed.

### Example 29

### Assay Identifying Myeloid Activity

[1268] The following protocol is used to assess myeloid activity of an albumin fusion protein of the present invention by determining whether the fusion protein proliferates and/or differentiates myeloid cells. Myeloid cell activity is assessed using the GAS/SEAP/Neo construct produced in Example 24. Thus, factors that increase SEAP activity indicate the ability to activate the Jaks-STATS signal transduction pathway. The myeloid cell used in this assay is U937, a pre-monocyte cell line, although TF-1, HL60, or KG1 can be used.

[1269] To transiently transfect U937 cells with the GAS/SEAP/Neo construct produced in Example 24, a DEAE-Dextran method (Kharbanda et. al., 1994, Cell Growth & Differentiation, 5:259-265) is used. First, harvest 2×10⁷ U937 cells and wash with PBS. The U937 cells are usually grown in RPMI 1640 medium containing 10% heat-inactivated fetal bovine serum (FBS) supplemented with 100 units/ml penicillin and 100 mg/ml streptomycin.

[1270] Next, suspend the cells in 1 ml of 20 mM Tris-HCl (pH 7.4) buffer containing 0.5 mg/ml DEAE-Dextran, 8 ug GAS-SEAP2 plasmid DNA, 140 mM NaCl, 5 mM KCl, 375 uM Na₂HPO₄.7H₂O, 1 mM MgCl₂, and 675 uM CaCl₂. Incubate at 37 degrees C. for 45 min.

[1271] Wash the cells with RPMI 1640 medium containing 10% FBS and then resuspend in 10 ml complete medium and incubate at 37 degree C. for 36 hr.

[1272] The GAS-SEAP/U937 stable cells are obtained by growing the cells in 400 ug/ml G418. The G418-free medium is used for routine growth but every one to two months, the cells should be re-grown in 400 ug/ml G418 for couple of passages.

[1273] These cells are tested by harvesting 1×10⁸ cells (this is enough for ten 96-well plates assay) and wash with PBS. Suspend the cells in 200 ml above described growth medium, with a final density of 5×10⁵ cells/ml. Plate 200 ul cells per well in the 96-well plate (or 1×10⁵ cells/well).

[1274] Add different concentrations of the fusion protein. Incubate at 37 degree C for 48 to 72 hr. As a positive control, 100 Unit/ml interferon gamma can be used which is known to activate U937 cells. Over 30 fold induction is typically observed in the positive control wells. SEAP assay the supernatant according to methods known in the art and/or the protocol described in Example 25.

### Example 30

### Assay Identifying Changes in Small Molecule Concentration and Membrane Permeability

[1275] Binding of a ligand to a receptor is known to alter intracellular levels of small molecules, such as calcium, potassium, sodium, and pH, as well as alter membrane potential. These alterations can be measured in an assay to identify fusion proteins which bind to receptors of a particular cell. Although the following protocol describes an assay for calcium, this protocol can easily be modified to detect changes in potassium, sodium, pH, membrane potential, or any other small molecule which is detectable by a fluorescent probe.

[1276] The following assay uses Fluorometric Imaging Plate Reader (“FLIPR”) to measure changes in fluorescent molecules (Molecular Probes) that bind small molecules. Clearly, any fluorescent molecule detecting a small molecule can be used instead of the calcium fluorescent molecule, fluo-4 (Molecular Probes, Inc.; catalog no. F-14202), used here.

[1277] For adherent cells, seed the cells at 10,000-20,000 cells/well in a Co-star black 96-well plate with clear bottom. The plate is incubated in a CO₂ incubator for 20 hours. The adherent cells are washed two times in Biotek washer with 200 ul of HBSS (Hank's Balanced Salt Solution) leaving 100 ul of buffer after the final wash.

[1278] A stock solution of 1 mg/ml fluo-4 is made in 10% pluronic acid DMSO. To load the cells with fluo-4, 50 ul of 12 ug/ml fluo-4 is added to each well. The plate is incubated at 37 degrees C. in a CO₂ incubator for 60 min. The plate is washed four times in the Biotek washer with HBSS leaving 100 ul of buffer.

[1279] For non-adherent cells, the cells are spun down from culture media. Cells are re-suspended to 2-5×10⁶ cells/ml with HBSS in a 50-ml conical tube. 4 ul of 1 mg/ml fluo-4 solution in 10% pluronic acid DMSO is added to each ml of cell suspension. The tube is then placed in a 37 degrees C. water bath for 30-60 min. The cells are washed twice with HBSS, resuspended to 1×10⁶ cells/ml, and dispensed into a microplate, 100 ul/well. The plate is centrifuged at 1000 rpm for 5 min. The plate is then washed once in Denley Cell Wash with 200 ul, followed by an aspiration step to 100 ul final volume.

[1280] For a non-cell based assay, each well contains a fluorescent molecule, such as fluo-4. The fusion protein of the invention is added to the well, and a change in fluorescence is detected.

[1281] To measure the fluorescence of intracellular calcium, the FLIPR is set for the following parameters: (1) System gain is 300-800 mW; (2) Exposure time is 0.4 second; (3) Camera F/stop is F/2; (4) Excitation is 488 nm; (5) Emission is 530 nm; and (6) Sample addition is 50 ul. Increased emission at 530 nm indicates an extracellular signaling event caused by an albumin fusion protein of the present invention or a molecule induced by an albumin fusion protein of the present invention, which has resulted in an increase in the intracellular Ca⁺⁺ concentration.

### Example 31

### Assay Identifying Tyrosine Kinase Activity

[1282] The Protein Tyrosine Kinases (PTK) represent a diverse group of transmembrane and cytoplasmic kinases. Within the Receptor Protein Tyrosine Kinase (RPTK) group are receptors for a range of mitogenic and metabolic growth factors including the PDGF, FGF, EGF, NGF, HGF and Insulin receptor subfamilies. In addition there are a large family of RPTKs for which the corresponding ligand is unknown. Ligands for RPTKs include mainly secreted small proteins, but also membrane-bound and extracellular matrix proteins.

[1283] Activation of RPTK by ligands involves ligand-mediated receptor dimerization, resulting in transphosphorylation of the receptor subunits and activation of the cytoplasmic tyrosine kinases. The cytoplasmic tyrosine kinases include receptor associated tyrosine kinases of the src-family (e.g., src, yes, lck, lyn, fyn) and non-receptor linked and cytosolic protein tyrosine kinases, such as the Jak family, members of which mediate signal transduction triggered by the cytokine superfamily of receptors (e.g., the Interleukins, Interferons, GM-CSF, and Leptin).

[1284] Because of the wide range of known factors capable of stimulating tyrosine kinase activity, identifying whether an albumin fusion protein of the present invention or a molecule induced by a fusion protein of the present invention is capable of activating tyrosine kinase signal transduction pathways is of interest. Therefore, the following protocol is designed to identify such molecules capable of activating the tyrosine kinase signal transduction pathways.

[1285] Seed target cells (e.g., primary keratinocytes) at a density of approximately 25,000 cells per well in a 96 well Loprodyne Silent Screen Plates purchased from Nalge Nunc (Naperville, Ill.). The plates are sterilized with two 30 minute rinses with 100% ethanol, rinsed with water and dried overnight. Some plates are coated for 2 hr with 100 ml of cell culture grade type I collagen (50 mg/ml), gelatin (2%) or polylysine (50 mg/ml), all of which can be purchased from Sigma Chemicals (St. Louis, Mo.) or 10% Matrigel purchased from Becton Dickinson (Bedford, Mass.), or calf serum, rinsed with PBS and stored at 4 degree C. Cell growth on these plates is assayed by seeding 5,000 cells/well in growth medium and indirect quantitation of cell number through use of alamarBlue as described by the manufacturer Alamar Biosciences, Inc. (Sacramento, Calif.) after 48 hr. Falcon plate covers #3071 from Becton Dickinson (Bedford, Mass.) are used to cover the Loprodyne Silent Screen Plates. Falcon Microtest III cell culture plates can also be used in some proliferation experiments.

[1286] To prepare extracts, A431 cells are seeded onto the nylon membranes of Loprodyne plates (20,000/200 ml/well) and cultured overnight in complete medium. Cells are quiesced by incubation in serum-free basal medium for 24 hr. After 5-20 minutes treatment with EGF (60 ng/ml) or a different concentrations of an albumin fusion protein of the invention, the medium was removed and 100 ml of extraction buffer ((20 mM HEPES pH 7.5, 0.15 M NaCl, 1% Triton X-100, 0.1% SDS, 2 mM Na3VO4, 2 mM Na4P207 and a cocktail of protease inhibitors (# 1836170) obtained from Boeheringer Mannheim (Indianapolis, Ind.)) is added to each well and the plate is shaken on a rotating shaker for 5 minutes at 4° C. The plate is then placed in a vacuum transfer manifold and the extract filtered through the 0.45 mm membrane bottoms of each well using house vacuum. Extracts are collected in a 96-well catch/assay plate in the bottom of the vacuum manifold and immediately placed on ice. To obtain extracts clarified by centrifugation, the content of each well, after detergent solubilization for 5 minutes, is removed and centrifuged for 15 minutes at 4 degree C. at 16,000×g.

[1287] Test the filtered extracts for levels of tyrosine kinase activity. Although many methods of detecting tyrosine kinase activity are known, one method is described here.

[1288] Generally, the tyrosine kinase activity of an albumin fusion protein of the invention is evaluated by determining its ability to phosphorylate a tyrosine residue on a specific substrate (a biotinylated peptide). Biotinylated peptides that can be used for this purpose include PSK1 (corresponding to amino acids 6-20 of the cell division kinase cdc2-p34) and PSK2 (corresponding to amino acids 1-17 of gastrin). Both peptides are substrates for a range of tyrosine kinases and are available from Boehringer Mannheim.

[1289] The tyrosine kinase reaction is set up by adding the following components in order. First, add 10 ul of 5 uM Biotinylated Peptide, then 10 ul ATP/Mg₂₊ (5 mM ATP/50 mM MgCl₂), then 10 ul of 5× Assay Buffer (40 mM imidazole hydrochloride, pH7.3, 40 mM beta-glycerophosphate, 1 mM EGTA, 100 mM MgCl₂, 5 mM MnCl₂, 0.5 mg/ml BSA), then 5 ul of Sodium Vanadate (1 mM), and then 5 ul of water. Mix the components gently and preincubate the reaction mix at 30 degree C. for 2 min. Initial the reaction by adding 10 ul of the control enzyme or the filtered supernatant.

[1290] The tyrosine kinase assay reaction is then terminated by adding 10 ul of 120 mm EDTA and place the reactions on ice.

[1291] Tyrosine kinase activity is determined by transferring 50 ul aliquot of reaction mixture to a microtiter plate (MTP) module and incubating at 37 degree C. for 20 min. This allows the streptavidin coated 96 well plate to associate with the biotinylated peptide. Wash the MTP module with 300 ul/well of PBS four times. Next add 75 ul of anti-phosphotyrosine antibody conjugated to horse radish peroxidase (anti-P-Tyr-POD (0.5 u/ml)) to each well and incubate at 37 degree C. for one hour. Wash the well as above.

[1292] Next add 100 ul of peroxidase substrate solution (Boehringer Mannheim) and incubate at room temperature for at least 5 mins (up to 30 min). Measure the absorbance of the sample at 405 nm by using ELISA reader. The level of bound peroxidase activity is quantitated using an ELISA reader and reflects the level of tyrosine kinase activity.

### Example 32

### Assay Identifying Phosphorylation Activity

[1293] As a potential alternative and/or complement to the assay of protein tyrosine kinase activity described in Example 31, an assay which detects activation (phosphorylation) of major intracellular signal transduction intermediates can also be used. For example, as described below one particular assay can detect tyrosine phosphorylation of the Erk-1 and Erk-2 kinases. However, phosphorylation of other molecules, such as Raf, JNK, p38 MAP, Map kinase kinase (MEK), MEK kinase, Src, Muscle specific kinase (MuSK), IRAK, Tec, and Janus, as well as any other phosphoserine, phosphotyrosine, or phosphothreonine molecule, can be detected by substituting these molecules for Erk-1 or Erk-2 in the following assay.

[1294] Specifically, assay plates are made by coating the wells of a 96-well ELISA plate with 0.1 ml of protein G (1 ug/ml) for 2 hr at room temp, (RT). The plates are then rinsed with PBS and blocked with 3% BSA/PBS for 1 hr at RT. The protein G plates are then treated with 2 commercial monoclonal antibodies (10 ng/well) against Erk-1 and Erk-2 (1 hr at RT) (Santa Cruz Biotechnology). (To detect other molecules, this step can easily be modified by substituting a monoclonal antibody detecting any of the above described molecules.) After 3-5 rinses with PBS, the plates are stored at 4 degree C. until use.

[1295] A431 cells are seeded at 20,000/well in a 96-well Loprodyne filterplate and cultured overnight in growth medium. The cells are then starved for 48 hr in basal medium (DMEM) and then treated with EGF (6 ng/well) or varying concentrations of the fusion protein of the invention for 5-20 minutes. The cells are then solubilized and extracts filtered directly into the assay plate.

[1296] After incubation with the extract for 1 hr at RT, the wells are again rinsed. As a positive control, a commercial preparation of MAP kinase (10 ng/well) is used in place of A431 extract. Plates are then treated with a commercial polyclonal (rabbit) antibody (1 ug/ml) which specifically recognizes the phosphorylated epitope of the Erk-1 and Erk-2 kinases (1 hr at RT). This antibody is biotinylated by standard procedures. The bound polyclonal antibody is then quantitated by successive incubations with Europium-streptavidin and Europium fluorescence enhancing reagent in the Wallac DELFIA instrument (time-resolved fluorescence). An increased fluorescent signal over background indicates a phosphorylation by the fusion protein of the present invention or a molecule induced by an albumin fusion protein of the present invention.

### Example 33

### Phosphorylation Assay

[1297] In order to assay for phosphorylation activity of an albumin fusion protein of the invention, a phosphorylation assay as described in U.S. Pat. No. 5,958,405 (which is herein incorporated by reference) is utilized. Briefly, phosphorylation activity may be measured by phosphorylation of a protein substrate using gamma-labeled ³²P-ATP and quantitation of the incorporated radioactivity using a gamma radioisotope counter. The fusion protein of the invention is incubated with the protein substrate, ³²P-ATP, and a kinase buffer. The ³²P incorporated into the substrate is then separated from free ³²P-ATP by electrophoresis, and the incorporated ³²P is counted and compared to a negative control. Radioactivity counts above the negative control are indicative of phosphorylation activity of the fusion protein.

### Example 34

### Detection of Phosphorylation Activity (Activation) of an Albumin Fusion Protein of the Invention in the Presence of Polypeptide Ligands

[1298] Methods known in the art or described herein may be used to determine the phosphorylation activity of an albumin fusion protein of the invention. A preferred method of determining phosphorylation activity is by the use of the tyrosine phosphorylation assay as described in U.S. Pat. No. 5,817,471 (incorporated herein by reference).

### Example 35

### Assay for the Stimulation of Bone Marrow CD34+ Cell Proliferation

[1299] This assay is based on the ability of human CD34+ to proliferate in the presence of hematopoietic growth factors and evaluates the ability of fusion proteins of the invention to stimulate proliferation of CD34+ cells.

[1300] It has been previously shown that most mature precursors will respond to only a single signal. More immature precursors require at least two signals to respond. Therefore, to test the effect of fusion proteins of the invention on hematopoietic activity of a wide range of progenitor cells, the assay contains a given fusion protein of the invention in the presence or absence of hematopoietic growth factors. Isolated cells are cultured for 5 days in the presence of Stem Cell Factor (SCF) in combination with tested sample. SCF alone has a very limited effect on the proliferation of bone marrow (BM) cells, acting in such conditions only as a “survival” factor. However, combined with any factor exhibiting stimulatory effect on these cells (e.g., IL-3), SCF will cause a synergistic effect. Therefore, if the tested fusion protein has a stimulatory effect on hematopoietic progenitors, such activity can be easily detected. Since normal BM cells have a low level of cycling cells, it is likely that any inhibitory effect of a given fusion protein might not be detected. Accordingly, assays for an inhibitory effect on progenitors is preferably tested in cells that are first subjected to in vitro stimulation with SCF+IL+3, and then contacted with the compound that is being evaluated for inhibition of such induced proliferation.

[1301] Briefly, CD34+ cells are isolated using methods known in the art. The cells are thawed and resuspended in medium (QBSF 60 serum-free medium with 1% L-glutamine (500 ml) Quality Biological, Inc., Gaithersburg, Md. Cat# 160-204-101). After several gentle centrifugation steps at 200×g, cells are allowed to rest for one hour. The cell count is adjusted to 2.5×10⁵ cells/ml. During this time, 100 μl of sterile water is added to the peripheral wells of a 96-well plate. The cytokines that can be tested with an albumin fusion protein of the invention in this assay is rhSCF (R&D Systems, Minneapolis, Minn., Cat# 255-SC) at 50 ng/ml alone and in combination with rhSCF and rhIL-3 (R&D Systems, Minneapolis, Minn., Cat# 203-ML) at 30 ng/ml. After one hour, 10 μl of prepared cytokines, varying concentrations of an albumin fusion protein of the invention, and 20 μl of diluted cells are added to the media which is already present in the wells to allow for a final total volume of 100 μl. The plates are then placed in a 37° C./5% CO₂ incubator for five days.

[1302] Eighteen hours before the assay is harvested, 0.5 μCi/well of [3H] Thymidine is added in a 10 μl volume to each well to determine the proliferation rate. The experiment is terminated by harvesting the cells from each 96-well plate to a filtermat using the Tomtec Harvester 96. After harvesting, the filtermats are dried, trimmed and placed into OmniFilter assemblies consisting of one OmniFilter plate and one OmniFilter Tray. 60 μl Microscint is added to each well and the plate sealed with TopSeal-A press-on sealing film A bar code 15 sticker is affixed to the first plate for counting. The sealed plates are then loaded and the level of radioactivity determined via the Packard Top Count and the printed data collected for analysis. The level of radioactivity reflects the amount of cell proliferation.

[1303] The studies described in this example test the activity of a given fusion protein to stimulate bone marrow CD34+ cell proliferation. One skilled in the art could easily modify the exemplified studies to test the activity of fusion proteins and polynucleotides of the invention (e.g., gene therapy) as well as agonists and antagonists thereof. The ability of an albumin fusion protein of the invention to stimulate the proliferation of bone marrow CD34+ cells indicates that the albumin fusion protein and/or polynucleotides corresponding to the fusion protein are useful for the diagnosis and treatment of disorders affecting the immune system and hematopoiesis. Representative uses are described in the “Immune Activity” and “Infectious Disease” sections above, and elsewhere herein.

### Example 36

### Assay for Extracellular Matrix Enhanced Cell Response (EMECR)

[1304] The objective of the Extracellular Matrix Enhanced Cell Response (EMECR) assay is to evaluate the ability of fusion proteins of the invention to act on hematopoietic stem cells in the context of the extracellular matrix (ECM) induced signal.

[1305] Cells respond to the regulatory factors in the context of signal(s) received from the surrounding microenvironment. For example, fibroblasts, and endothelial and epithelial stem cells fail to replicate in the absence of signals from the ECM. Hematopoietic stem cells can undergo self-renewal in the bone marrow, but not in in vitro suspension culture. The ability of stem cells to undergo self-renewal in vitro is dependent upon their interaction with the stromal cells and the ECM protein fibronectin (fn). Adhesion of cells to fn is mediated by the α₅.β₁ and α₄.β₁ integrin receptors, which are expressed by human and mouse hematopoietic stem cells. The factor(s) which integrate with the ECM environment and are responsible for stimulating stem cell self-renewal have not yet been identified. Discovery of such factors should be of great interest in gene therapy and bone marrow transplant applications

[1306] Briefly, polystyrene, non tissue culture treated, 96-well plates are coated with fn fragment at a coating concentration of 0.2 μg/cm². Mouse bone marrow cells are plated (1,000 cells/well) in 0.2 ml of serum-free medium. Cells cultured in the presence of IL-3 (5 ng/ml)+SCF (50 ng/ml) would serve as the positive control, conditions under which little self-renewal but pronounced differentiation of the stem cells is to be expected. Albumin fusion proteins of the invention are tested with appropriate negative controls in the presence and absence of SCF (5.0 ng/ml), where volume of the administered composition containing the albumin fusion protein of the invention represents 10% of the total assay volume. The plated cells are then allowed to grow by incubating in a low oxygen environment (5% CO₂, 7% O₂, and 88% N₂) tissue culture incubator for 7 days. The number of proliferating cells within the wells is then quantitated by measuring thymidine incorporation into cellular DNA. Verification of the positive hits in the assay will require phenotypic characterization of the cells, which can be accomplished by scaling up of the culture system and using appropriate antibody reagents against cell surface antigens and FACScan.

[1307] If a particular fusion protein of the present invention is found to be a stimulator of hematopoietic progenitors, the fusion protein and polynucleotides corresponding to the fusion protein may be useful for example, in the diagnosis and treatment of disorders affecting the immune system and hematopoiesis. Representative uses are described in the “Immune Activity” and “Infectious Disease” sections above, and elsewhere herein. The fusion protein may also be useful in the expansion of stem cells and committed progenitors of various blood lineages, and in the differentiation and/or proliferation of various cell types.

[1308] Additionally, the albumin fusion proteins of the invention and polynucleotides encoding albumin fusion proteins of the invention, may also be employed to inhibit the proliferation and differentiation of hematopoietic cells and therefore may be employed to protect bone marrow stem cells from chemotherapeutic agents during chemotherapy. This antiproliferative effect may allow administration of higher doses of chemotherapeutic agents and, therefore, more effective chemotherapeutic treatment.

[1309] Moreover, fusion proteins of the invention and polynucleotides encoding albumin fusion proteins of the invention may also be useful for the treatment and diagnosis of hematopoietic related disorders such as, anemia, pancytopenia, leukopenia, thrombocytopenia or leukemia, since stromal cells are important in the production of cells of hematopoietic lineages. The uses include bone marrow cell ex-vivo culture, bone marrow transplantation, bone marrow reconstitution, radiotherapy or chemotherapy of neoplasia.

### Example 37

### Human Dermal Fibroblast and Aortic Smooth Muscle Cell Proliferation

[1310] An albumin fusion protein of the invention is added to cultures of normal human dermal fibroblasts (NHDF) and human aortic smooth muscle cells (AoSMC) and two co-assays are performed with each sample. The first assay examines the effect of the fusion protein on the proliferation of normal human dermal fibroblasts (NHDF) or aortic smooth muscle cells (AoSMC). Aberrant growth of fibroblasts or smooth muscle cells is a part of several pathological processes, including fibrosis, and restenosis. The second assay examines IL6 production by both NHDF and SMC. IL6 production is an indication of functional activation. Activated cells will have increased production of a number of cytokines and other factors, which can result in a proinflammatory or immunomodulatory outcome. Assays are run with and without co-TNFa stimulation, in order to check for costimulatory or inhibitory activity.

[1311] Briefly, on day 1, 96-well black plates are set up with 1000 cells/well (NHDF) or 2000 cells/well (AoSMC) in 100 μl culture media. NHDF culture media contains: Clonetics FB basal media, 1 mg/ml hFGF, 5 mg/ml insulin, 50 mg/ml gentamycin, 2% FBS, while AoSMC culture media contains Clonetics SM basal media, 0.5 μg/ml hEGF, 5 mg/ml insulin, 1 μg/ml hFGF, 50 mg/ml gentamycin, 50 μg/ml Amphotericin B, 5% FBS. After incubation at 37° C. for at least 4-5 hours culture media is aspirated and replaced with growth arrest media. Growth arrest media for NHDF contains fibroblast basal media, 50 mg/ml gentamycin, 2% FBS, while growth arrest media for AoSMC contains SM basal media, 50 mg/ml gentamycin, 50 μg/ml Amphotericin B, 0.4% FBS. Incubate at 37° C. until day 2.

[1312] On day 2, serial dilutions and templates of an albumin fusion protein of the invention are designed such that they always include media controls and known-protein controls. For both stimulation and inhibition experiments, proteins are diluted in growth arrest media. For inhibition experiments, TNFa is added to a final concentration of 2 ng/ml (NHDF) or 5 ng/ml (AoSMC). Add ⅓ vol media containing controls or an albumin fusion protein of the invention and incubate at 37 degrees C./5% CO₂ until day 5.

[1313] Transfer 60 μl from each well to another labeled 96-well plate, cover with a plate-sealer, and store at 4 degrees C. until Day 6 (for IL6 ELISA). To the remaining 100 μl in the cell culture plate, aseptically add Alamar Blue in an amount equal to 10% of the culture volume (10 μl). Return plates to incubator for 3 to 4 hours. Then measure fluorescence with excitation at 530 nm and emission at 590 nm using the CytoFluor. This yields the growth stimulation/inhibition data.

[1314] On day 5, the IL6 ELISA is performed by coating a 96 well plate with 50-100 ul/well of Anti-Human IL6 Monoclonal antibody diluted in PBS, pH 7.4, incubate ON at room temperature.

[1315] On day 6, empty the plates into the sink and blot on paper towels. Prepare Assay Buffer containing PBS with 4% BSA. Block the plates with 200 μl/well of Pierce Super Block blocking buffer in PBS for 1-2 hr and then wash plates with wash buffer (PBS, 0.05% Tween-20). Blot plates on paper towels. Then add 50 μl/well of diluted Anti-Human IL-6 Monoclonal, Biotin-labeled antibody at 0.50 mg/ml. Make dilutions of IL-6 stock in media (30, 10, 3, 1, 0.3, 0 ng/ml). Add duplicate samples to top row of plate. Cover the plates and incubate for 2 hours at RT on shaker.

[1316] Plates are washed with wash buffer and blotted on paper towels. Dilute EU-labeled Streptavidin 1:1000 in Assay buffer, and add 100 μl/well. Cover the plate and incubate 1 h at RT. Plates are again washed with wash buffer and blotted on paper towels.

[1317] Add 100 μl/well of Enhancement Solution. Shake for 5 minutes. Read the plate on the Wallac DELFIA Fluorometer. Readings from triplicate samples in each assay were tabulated and averaged.

[1318] A positive result in this assay suggests AoSMC cell proliferation and that the albumin fusion protein may be involved in dermal fibroblast proliferation and/or smooth muscle cell proliferation. A positive result also suggests many potential uses of the fusion protein and polynucleotides encoding the albumin fusion protein. For example, inflammation and immune responses, wound healing, and angiogenesis, as detailed throughout this specification. Particularly, fusion proteins may be used in wound healing and dermal regeneration, as well as the promotion of vasculogenesis, both of the blood vessels and lymphatics. The growth of vessels can be used in the treatment of, for example, cardiovascular diseases. Additionally, fusion proteins showing antagonistic activity in this assay may be useful in treating diseases, disorders, and/or conditions which involve angiogenesis by acting as an anti-vascular agent (e.g., anti-angiogenesis). These diseases, disorders, and/or conditions are known in the art and/or are described herein, such as, for example, malignancies, solid tumors, benign tumors, for example hemangiomas, acoustic neuromas, neurofibromas, trachomas, and pyogenic granulomas; artheroscleric plaques; ocular angiogenic diseases, for example, diabetic retinopathy, retinopathy of prematurity, macular degeneration, corneal graft rejection, neovascular glaucoma, retrolental fibroplasia, rubeosis, retinoblastoma, uvietis and Pterygia (abnormal blood vessel growth) of the eye; rheumatoid arthritis; psoriasis; delayed wound healing; endometriosis; vasculogenesis; granulations; hypertrophic scars (keloids); nonunion fractures; scleroderma; trachoma; vascular adhesions; myocardial angiogenesis; coronary collaterals; cerebral collaterals; arteriovenous malformations; ischemic limb angiogenesis; Osler-Webber Syndrome; plaque neovascularization; telangiectasia; hemophiliac joints; angiofibroma; fibromuscular dysplasia; wound granulation; Crohn's disease; and atherosclerosis. Moreover, albumin fusion proteins that act as antagonists in this assay may be useful in treating anti-hyperproliferative diseases and/or anti-inflammatory known in the art and/or described herein.

### Example 38

### Cellular Adhesion Molecule (CAM) Expression on Endothelial Cells

[1319] The recruitment of lymphocytes to areas of inflammation and angiogenesis involves specific receptor-ligand interactions between cell surface adhesion molecules (CAMs) on lymphocytes and the vascular endothelium. The adhesion process, in both normal and pathological settings, follows a multi-step cascade that involves intercellular adhesion molecule-1 (ICAM-1), vascular cell adhesion molecule-1 (VCAM-1), and endothelial leukocyte adhesion molecule-1 (E-selectin) expression on endothelial cells (EC). The expression of these molecules and others on the vascular endothelium determines the efficiency with which leukocytes may adhere to the local vasculature and extravasate into the local tissue during the development of an inflammatory response. The local concentration of cytokines and growth factor participate in the modulation of the expression of these CAMs.

[1320] Briefly, endothelial cells (e.g., Human Umbilical Vein Endothelial cells (HUVECs)) are grown in a standard 96 well plate to confluence, growth medium is removed from the cells and replaced with 100 μl of 199 Medium (10% fetal bovine serum (FBS)). Samples for testing (containing an albumin fusion protein of the invention) and positive or negative controls are added to the plate in triplicate (in 10 μl volumes). Plates are then incubated at 37° C. for either 5 h (selectin and integrin expression) or 24 h (integrin expression only). Plates are aspirated to remove medium and 100 ul of 0.1% paraformaldehyde-PBS (with Ca++ and Mg++) is added to each well. Plates are held at 4° C. for 30 min. Fixative is removed from the wells and wells are washed 1× with PBS (+Ca,Mg)+0.5% BSA and drained. 10 μl of diluted primary antibody is added to the test and control wells. Anti-ICAM-1-Biotin, Anti-VCAM-1-Biotin and Anti-E-selectin-Biotin are used at a concentration of 10 μg/ml (1:10 dilution of 0.1 mg/ml stock antibody). Cells are incubated at 37° C. for 30 min. in a humidified environment. Wells are washed three times with PBS (+Ca,Mg)+0.5% BSA. 20 μl of diluted ExtrAvidin-Alkaline Phosphatase (1:5,000 dilution, referred to herein as the working dilution) are added to each well and incubated at 37° C. for 30 min. Wells are washed three times with PBS (+Ca,Mg)+0.5% BSA. Dissolve 1 tablet of p-Nitrophenol Phosphate pNPP per 5 ml of glycine buffer (pH 10.4). 100 μl of pNPP substrate in glycine buffer is added to each test well. Standard wells in triplicate are prepared from the working dilution of the ExtrAvidin-Alkaline Phosphotase in glycine buffer: 1:5,000 (10⁰)>10^{-0.5}>10⁻¹>10^{-1.5}. 5 μl of each dilution is added to triplicate wells and the resulting AP content in each well is 5.50 ng, 1.74 ng, 0.55 ng, 0.18 ng. 100 μl of pNNP reagent is then added to each of the standard wells. The plate is incubated at 37° C. for 4 h. A volume of 50 μl of 3M NaOH is added to all wells. The plate is read on a plate reader at 405 nm using the background subtraction option on blank wells filled with glycine buffer only. Additionally, the template is set up to indicate the concentration of AP-conjugate in each standard well [5.50 ng; 1.74 ng; 0.55 ng; 0.18 ng]. Results are indicated as amount of bound AP-conjugate in each sample.

### Example 39

### Alamar Blue Endothelial Cells Proliferation Assay

[1321] This assay may be used to quantitatively determine protein mediated inhibition of bFGF-induced proliferation of Bovine Lymphatic Endothelial Cells (LECs), Bovine Aortic Endothelial Cells (BAECs) or Human Microvascular Uterine Myometrial Cells (UTMECs). This assay incorporates a fluorometric growth indicator based on detection of metabolic activity. A standard Alamar Blue Proliferation Assay is prepared in EGM-2MV with 10 ng/ml of bFGF added as a source of endothelial cell stimulation. This assay may be used with a variety of endothelial cells with slight changes in growth medium and cell concentration. Dilutions of protein batches to be tested are diluted as appropriate. Serum-free medium (GIBCO SFM) without bFGF is used as a non-stimulated control and Angiostatin or TSP-1 are included as a known inhibitory controls.

[1322] Briefly, LEC, BAECs or UTMECs are seeded in growth media at a density of 5000 to 2000 cells/well in a 96 well plate and placed at 37 degrees C overnight. After the overnight incubation of the cells, the growth media is removed and replaced with GIBCO EC-SFM. The cells are treated with the appropriate dilutions of an albumin fusion protein of the invention or control protein sample(s) (prepared in SFM) in triplicate wells with additional bFGF to a concentration of 10 ng/ml. Once the cells have been treated with the samples, the plate(s) is/are placed back in the 37° C. incubator for three days. After three days 10 ml of stock alamar blue (Biosource Cat# DAL1100) is added to each well and the plate(s) is/are placed back in the 37° C. incubator for four hours. The plate(s) are then read at 530 nm excitation and 590 nm emission using the CytoFluor fluorescence reader. Direct output is recorded in relative fluorescence units.

[1323] Alamar blue is an oxidation-reduction indicator that both fluoresces and changes color in response to chemical reduction of growth medium resulting from cell growth. As cells grow in culture, innate metabolic activity results in a chemical reduction of the immediate surrounding environment. Reduction related to growth causes the indicator to change from oxidized (non-fluorescent blue) form to reduced (fluorescent red) form (i.e., stimulated proliferation will produce a stronger signal and inhibited proliferation will produce a weaker signal and the total signal is proportional to the total number of cells as well as their metabolic activity). The background level of activity is observed with the starvation medium alone. This is compared to the output observed from the positive control samples (bFGF in growth medium) and protein dilutions.

### Example 40

### Detection of Inhibition of a Mixed Lymphocyte Reaction

[1324] This assay can be used to detect and evaluate inhibition of a Mixed Lymphocyte Reaction (MLR) by fusion proteins of the invention. Inhibition of a MLR may be due to a direct effect on cell proliferation and viability, modulation of costimulatory molecules on interacting cells, modulation of adhesiveness between lymphocytes and accessory cells, or modulation of cytokine production by accessory cells. Multiple cells may be targeted by the albumin fusion proteins that inhibit MLR since the peripheral blood mononuclear fraction used in this assay includes T, B and natural killer lymphocytes, as well as monocytes and dendritic cells.

[1325] Albumin fusion proteins of the invention found to inhibit the MLR may find application in diseases associated with lymphocyte and monocyte activation or proliferation. These include, but are not limited to, diseases such as asthma, arthritis, diabetes, inflammatory skin conditions, psoriasis, eczema, systemic lupus erythematosus, multiple sclerosis, glomerulonephritis, inflammatory bowel disease, crohn's disease, ulcerative colitis, arteriosclerosis, cirrhosis, graft vs. host disease, host vs. graft disease, hepatitis, leukemia and lymphoma.

[1326] Briefly, PBMCs from human donors are purified by density gradient centrifugation using Lymphocyte Separation Medium (LSM®, density 1.0770 g/ml, Organon Teknika Corporation, West Chester, Pa.). PBMCs from two donors are adjusted to 2×10⁶ cells/ml in RPMI-1640 (Life Technologies, Grand Island, N.Y.) supplemented with 10% FCS and 2 mM glutamine. PBMCs from a third donor is adjusted to 2×10⁵ cells/ml. Fifty microliters of PBMCs from each donor is added to wells of a 96-well round bottom microtiter plate. Dilutions of the fusion protein test material (50 μl) is added in triplicate to microtiter wells. Test samples (of the protein of interest) are added for final dilution of 1:4; rhuIL-2 (R&D Systems, Minneapolis, Minn., catalog number 202-IL) is added to a final concentration of 1 μg/ml; anti-CD4 mAb (R&D Systems, clone 34930.11, catalog number MAB379) is added to a final concentration of 10 μg/ml. Cells are cultured for 7-8 days at 37° C. in 5% CO₂, and 1 μC of [³H] thymidine is added to wells for the last 16 hrs of culture. Cells are harvested and thymidine incorporation determined using a Packard TopCount. Data is expressed as the mean and standard deviation of triplicate determinations.

[1327] Samples of the fusion protein of interest are screened in separate experiments and compared to the negative control treatment, anti-CD4 mAb, which inhibits proliferation of lymphocytes and the positive control treatment, IL-2 (either as recombinant material or supernatant), which enhances proliferation of lymphocytes.

### Example 41

### Assays for Protease Activity

[1328] The following assay may be used to assess protease activity of an albumin fusion protein of the invention.

[1329] Gelatin and casein zymography are performed essentially as described (Heusen et al., Anal. Biochem., 102:196-202 (1980); Wilson et al., Journal of Urology, 149:653-658 (1993)). Samples are run on 10% polyacryamide/0.1% SDS gels containing 1% gelain orcasein, soaked in 2.5% triton at room temperature for 1 hour, and in 0.1M glycine, pH 8.3 at 37° C. 5 to 16 hours. After staining in amido black areas of proteolysis appear as clear areas agains the blue-black background. Trypsin (Sigma T8642) is used as a positive control.

[1330] Protease activity is also determined by monitoring the cleavage of n-a-benzoyl-L-arginine ethyl ester (BAEE) (Sigma B-4500. Reactions are set up in (25 mMNaPO₄, 1 mM EDTA, and 1 mM BAEE), pH 7.5. Samples are added and the change in absorbance at 260 nm is monitored on the Beckman DU-6 spectrophotometer in the time-drive mode. Trypsin is used as a positive control.

[1331] Additional assays based upon the release of acid-soluble peptides from casein or hemoglobin measured as absorbance at 280 nm or colorimetrically using the Folin method are performed as described in Bergmeyer, et al., Methods of Enzymatic Analysis, 5 (1984). Other assays involve the solubilization of chromogenic substrates (Ward, Applied Science, 251-317 (1983)).

### Example 42

### Identifying Serine Protease Substrate Specificity

[1332] Methods known in the art or described herein may be used to determine the substrate specificity of the albumin fusion proteins of the present invention having serine protease activity. A preferred method of determining substrate specificity is by the use of positional scanning synthetic combinatorial libraries as described in GB 2 324 529 (incorporated herein in its entirety).

### Example 43

### Ligand Binding Assays

[1333] The following assay may be used to assess ligand binding activity of an albumin fusion protein of the invention.

[1334] Ligand binding assays provide a direct method for ascertaining receptor pharmacology and are adaptable to a high throughput format. The purified ligand for an albumin fusion protein of the invention is radiolabeled to high specific activity (50-2000 Ci/mmol) for binding studies. A determination is then made that the process of radiolabeling does not diminish the activity of the ligand towards the fusion protein. Assay conditions for buffers, ions, pH and other modulators such as nucleotides are optimized to establish a workable signal to noise ratio for both membrane and whole cell polypeptide sources. For these assays, specific polypeptide binding is defined as total associated radioactivity minus the radioactivity measured in the presence of an excess of unlabeled competing ligand. Where possible, more than one competing ligand is used to define residual nonspecific binding.

### Example 44

### Functional Assay in Xenopus Oocytes

[1335] Capped RNA transcripts from linearized plasmid templates encoding an albumin fusion protein of the invention is synthesized in vitro with RNA polymerases in accordance with standard procedures. In vitro transcripts are suspended in water at a final concentration of 0.2 mg/ml. Ovarian lobes are removed from adult female toads, Stage V defolliculated oocytes are obtained, and RNA transcripts (10 ng/oocytc) are injected in a 50 nl bolus using a microinjection apparatus. Two electrode voltage clamps are used to measure the currents from individual Xenopus oocytes in response fusion protein and polypeptide agonist exposure. Recordings are made in Ca2+ free Barth's medium at room temperature. The Xenopus system can be used to screen known ligands and tissue/cell extracts for activating ligands.

### Example 45

### Microphysiometric Assays

[1336] Activation of a wide variety of secondary messenger systems results in extrusion of small amounts of acid from a cell. The acid formed is largely as a result of the increased metabolic activity required to fuel the intracellular signaling process. The pH changes in the media surrounding the cell are very small but are detectable by the CYTOSENSOR microphysiometer (Molecular Devices Ltd., Menlo Park, Calif.). The CYTOSENSOR is thus capable of detecting the ability of an albumin fusion protein of the invention to activate secondary messengers that are coupled to an energy utilizing intracellular signaling pathway.

### Example 46

### Extract/Cell Supernatant Screening

[1337] A large number of mammalian receptors exist for which there remains, as yet, no cognate activating ligand (agonist). Thus, active ligands for these receptors may not be included within the ligands banks as identified to date. Accordingly, the albumin fusion proteins of the invention can also be functionally screened (using calcium, cAMP, microphysiometer, oocyte electrophysiology, etc., functional screens) against tissue extracts to identify natural ligands for the Therapeutic protein portion and/or albumin protein portion of an albumin fusion protein of the invention. Extracts that produce positive functional responses can be sequentially subfractionated until an activating ligand is isolated and identified.

### Example 47

### ATP-Binding Assay

[1338] The following assay may be used to assess ATP-binding activity of fusion proteins of the invention.

[1339] ATP-binding activity of an albumin fusion protein of the invention may be detected using the ATP-binding assay described in U.S. Pat. No. 5,858,719, which is herein incorporated by reference in its entirety. Briefly, ATP-binding to an albumin fusion protein of the invention is measured via photoaffinity labeling with 8-azido-ATP in a competition assay. Reaction mixtures containing 1 mg/ml of ABC transport protein are incubated with varying concentrations of ATP, or the non-hydrolyzable ATP analog adenyl-5′-imidodiphosphate for 10 minutes at 4° C. A mixture of 8-azido-ATP (Sigma Chem. Corp., St. Louis, Mo.) plus 8-azido-ATP (³²P-ATP) (5 mCi/μmol, ICN, Irvine Calif.) is added to a final concentration of 100 μM and 0.5 ml aliquots are placed in the wells of a porcelain spot plate on ice. The plate is irradiated using a short wave 254 nm UV lamp at a distance of 2.5 cm from the plate for two one-minute intervals with a one-minute cooling interval in between. The reaction is stopped by addition of dithiothreitol to a final concentration of 2 mM. The incubations are subjected to SDS-PAGE electrophoresis, dried, and autoradiographed. Protein bands corresponding to the albumin fusion proteins of the invention are excised, and the radioactivity quantified. A decrease in radioactivity with increasing ATP or adenly-5′-imidodiphosphate provides a measure of ATP affinity to the fusion protein.

### Example 48

### Identification of Signal Transduction Proteins that Interact with an Albumin Fusion Protein of the Present Invention

[1340] Albumin fusion proteins of the invention may serve as research tools for the identification, characterization and purification of signal transduction pathway proteins or receptor proteins. Briefly, a labeled fusion protein of the invention is useful as a reagent for the purification of molecules with which it interacts. In one embodiment of affinity purification, an albumin fusion protein of the invention is covalently coupled to a chromatography column. Cell-free extract derived from putative target cells, such as carcinoma tissues, is passed over the column, and molecules with appropriate affinity bind to the albumin fusion protein. The protein complex is recovered from the column, dissociated, and the recovered molecule subjected to N-terminal protein sequencing. This amino acid sequence is then used to identify the captured molecule or to design degenerate oligonucleotide probes for cloning the relevant gene from an appropriate cDNA library.

### Example 49

### IL-6 Bioassay

[1341] A variety of assays are known in the art for testing the proliferative effects of an albumin fusion protein of the invention. For example, one such assay is the IL-6 Bioassay as described by Marz et al. (Proc. Natl. Acad. Sci., U.S.A., 95:3251-56 (1998), which is herein incorporated by reference). After 68 hrs. at 37° C., the number of viable cells is measured by adding the tetrazolium salt thiazolyl blue (MTT) and incubating for a further 4 hrs. at 37° C. B9 cells are lysed by SDS and optical density is measured at 570 nm. Controls containing IL-6 (positive) and no cytokine (negative) are Briefly, IL-6 dependent B9 murine cells are washed three times in IL-6 free medium and plated at a concentration of 5,000 cells per well in 50 μl, and 50 μl of fusion protein of the invention is added. utilized. Enhanced proliferation in the test sample(s) (containing an albumin fusion protein of the invention) relative to the negative control is indicative of proliferative effects mediated by the fusion protein.

### Example 50

### Support of Chicken Embryo Neuron Survival

[1342] To test whether sympathetic neuronal cell viability is supported by an albumin fusion protein of the invention, the chicken embryo neuronal survival assay of Senaldi et al may be utilized (Proc. Natl. Acad. Sci., U.S.A., 96:11458-63 (1998), which is herein incorporated by reference). Briefly, motor and sympathetic neurons are isolated from chicken embryos, resuspended in L15 medium (with 10% FCS, glucose, sodium selenite, progesterone, conalbumin, putrescine, and insulin; Life Technologies, Rockville, Md.) and Dulbecco's modified Eagles medium [with 10% FCS, glutamine, penicillin, and 25 mM Hepes buffer (pH 7.2); Life Technologies, Rockville, Md.], respectively, and incubated at 37° C. in 5% CO₂ in the presence of different concentrations of the purified fusion protein of the invention, as well as a negative control lacking any cytokine. After 3 days, neuron survival is determined by evaluation of cellular morphology, and through the use of the colorimetric assay of Mosmann (Mosmann, T., J. Immunol. Methods, 65:55-63 (1983)). Enhanced neuronal cell viability as compared to the controls lacking cytokine is indicative of the ability of the albumin fusion protein to enhance the survival of neuronal cells.

### Example 51

### Assay for Phosphatase Activity

[1343] The following assay may be used to assess serine/threonine phosphatase (PTPase) activity of an albumin fusion protein of the invention.

[1344] In order to assay for serine/threonine phosphatase (PTPase) activity, assays can be utilized which are widely known to those skilled in the art. For example, the serine/threonine phosphatase (PSPase) activity of an albumin fusion protein of the invention may be measured using a PSPase assay kit from New England Biolabs, Inc. Myelin basic protein (MyBP), a substrate for PSPase, is phosphorylated on serine and threonine residues with cAMP-dependent Protein Kinase in the presence of [³²P]ATP. Protein serine/threonine phosphatase activity is then determined by measuring the release of inorganic phosphate from 32P-labeled MyBP.

### Example 52

### Interaction of Serine/Threonine Phosphatases with Other Proteins

[1345] Fusion proteins of the invention having serine/threonine phosphatase activity (e.g., as determined in Example 51) are useful, for example, as research tools for the identification, characterization and purification of additional interacting proteins or receptor proteins, or other signal transduction pathway proteins. Briefly, a labeled fusion protein of the invention is useful as a reagent for the purification of molecules with which it interacts. In one embodiment of affinity purification, an albumin fusion protein of the invention is covalently coupled to a chromatography column. Cell-free extract derived from putative target cells, such as neural or liver cells, is passed over the column, and molecules with appropriate affinity bind to the fusion protein. The fusion protein-complex is recovered from the column, dissociated, and the recovered molecule subjected to N-terminal protein sequencing. This amino acid sequence is then used to identify the captured molecule or to design degenerate oligonucleotide probes for cloning the relevant gene from an appropriate cDNA library.

### Example 53

### Assaying for Heparanase Activity

[1346] There a numerous assays known in the art that may be employed to assay for heparanase activity of an albumin fusion protein of the invention. In one example, heparanase activity of an albumin fusion protein of the invention, is assayed as described by Vlodavsky et al., (Vlodavsky et al., Nat. Med., 5:793-802 (1999)). Briefly, cell lysates, conditioned media, intact cells (1×10⁶ cells per 35-mm dish), cell culture supernatant, or purified fusion protein are incubated for 18 hrs at 37° C., pH 6.2-6.6, with ³⁵S-labeled ECM or soluble ECM derived peak I proteoglycans. The incubation medium is centrifuged and the supernatant is analyzed by gel filtration on a Sepharose CL-6B column (0.9×30 cm). Fractions are eluted with PBS and their radioactivity is measured. Degradation fragments of heparan sulfate side chains are eluted from Sepharose 6B at 0.5<Kₐᵥ<0.8 (peak II). Each experiment is done at least three times. Degradation fragments corresponding to “peak II,” as described by Vlodavsky et al., is indicative of the activity of an albumin fusion protein of the invention in cleaving heparan sulfate.

### Example 54

### Immobilization of Biomolecules

[1347] This example provides a method for the stabilization of an albumin fusion protein of the invention in non-host cell lipid bilayer constructs (see, e.g., Bieri et al., Nature Biotech 17:1105-1108 (1999), hereby incorporated by reference in its entirety herein) which can be adapted for the study of fusion proteins of the invention in the various functional assays described above. Briefly, carbohydrate-specific chemistry for biotinylation is used to confine a biotin tag to an albumin fusion protein of the invention, thus allowing uniform orientation upon immobilization. A 50 uM solution of an albumin fusion protein of the invention in washed membranes is incubated with 20 mM NaIO4 and 1.5 mg/ml (4 mM) BACH or 2 mg/ml (7.5 mM) biotin-hydrazide for 1 hr at room temperature (reaction volume, 150 ul). Then the sample is dialyzed (Pierce Slidealizer Cassett, 10 kDa cutoff; Pierce Chemical Co., Rockford Ill.) at 4C first for 5 h, exchanging the buffer after each hour, and finally for 12 h against 500 ml buffer R (0.15 M NaCl, 1 mM MgCl₂, 10 mM sodium phosphate, pH7). Just before addition into a cuvette, the sample is diluted 1:5 in buffer ROG50 (Buffer R supplemented with 50 mM octylglucoside).

### Example 55

### Assays for Metalloproteinase Activity

[1348] Metalloproteinases are peptide hydrolases which use metal ions, such as Zn²⁺, as the catalytic mechanism. Metalloproteinase activity of an albumin fusion protein of the present invention can be assayed according to methods known in the art. The following exemplary methods are provided:

[1349] Proteolysis of Alpha-2-Macroglobulin

[1350] To confirm protease activity, a purified fusion protein of the invention is mixed with the substrate alpha-2-macroglobulin (0.2 unit/ml; Boehringer Mannheim, Germany) in 1× assay buffer (50 mM HEPES, pH 7.5, 0.2 M NaCl, 10 mM CaCl₂, 25 μM ZnCl₂ and 0.05% Brij-35) and incubated at 37° C. for 1-5 days. Trypsin is used as positive control. Negative controls contain only alpha-2-macroglobulin in assay buffer. The samples are collected and boiled in SDS-PAGE sample buffer containing 5% 2-mercaptoethanol for 5-min, then loaded onto 8% SDS-polyacrylamide gel. After electrophoresis the proteins are visualized by silver staining. Proteolysis is evident by the appearance of lower molecular weight bands as compared to the negative control.

[1351] Inhibition of Alpha-2-Macroglobulin Proteolysis by Inhibitors of Metalloproteinases

[1352] Known metalloproteinase inhibitors (metal chelators (EDTA, EGTA, AND HgCl₂), peptide metalloproteinase inhibitors (TIMP-1 and TIMP-2), and commercial small molecule MMP inhibitors) may also be used to characterize the proteolytic activity of an albumin fusion protein of the invention. Three synthetic MMP inhibitors that may be used are: MMP inhibitor I, [IC₅₀=1.0 μM against MMP-1 and MMP-8; IC₅₀=30 μM against MMP-9; IC₅₀=150 μM against MMP-3]; MMP-3 (stromelysin-1) inhibitor I [IC₅₀=5 μM against MMP-3], and MMP-3 inhibitor II [Kᵢ=130 nM against MMP-3]; inhibitors available through Calbiochem, catalog #444250, 444218, and 444225, respectively). Briefly, different concentrations of the small molecule MMP inhibitors are mixed with a purified fusion protein of the invention (50 μg/ml) in 22.9 μl of 1×HEPES buffer (50 mM HEPES, pH 7.5, 0.2 M NaCl, 10 mM CaCl₂, 25 μM ZnCl₂ and 0.05% Brij-35) and incubated at room temperature (24° C.) for 2-hr, then 7.1 μl of substrate alpha-2-macroglobulin (0.2 unit/ml) is added and incubated at 37° C. for 20-hr. The reactions are stopped by adding 4× sample buffer and boiled immediately for 5 minutes. After SDS-PAGE, the protein bands are visualized by silver stain.

[1353] Synthetic Fluorogenic Peptide Substrates Cleavage Assay

[1354] The substrate specificity for fusion proteins of the invention with demonstrated metalloproteinase activity may be determined using techniques known in the art, such as using synthetic fluorogenic peptide substrates (purchased from BACHEM Bioscience Inc). Test substrates include, M-1985, M-2225, M-2105, M-2110, and M-2255. The first four are MMP substrates and the last one is a substrate of tumor necrosis factor-α(TNF-α) converting enzyme (TACE). These substrates are preferably prepared in 1:1 dimethyl sulfoxide (DMSO) and water. The stock solutions are 50-500 μM. Fluorescent assays are performed by using a Perkin Elmer LS 50B luminescence spectrometer equipped with a constant temperature water bath. The excitation λ is 328 nm and the emission λ is 393 nm. Briefly, the assay is carried out by incubating 176 μl 1×HEPES buffer (0.2 M NaCl, 10 mM CaCl₂, 0.05% Brij-35 and 50 mM HEPES, pH 7.5) with 4 μl of substrate solution (50 μM) at 25° C. for 15 minutes, and then adding 2011 of a purified fusion protein of the invention into the assay cuvett. The final concentration of substrate is 1 μM. Initial hydrolysis rates are monitored for 30-min.

### Example 56

### Occurrence of Diabetes in NOD Mice

[1355] Female NOD (non-obese diabetic) mice are characterized by displaying IDDM with a course which is similar to that found in humans, although the disease is more pronounced in female than male NOD mice. Hereinafter, unless otherwise stated, the term “NOD mouse” refers to a female NOD mouse. NOD mice have a progressive destruction of beta cells which is caused by a chronic autoimmune disease. Thus, NOD mice begin life with euglycemia, or normal blood glucose levels. By about 15 to 16 weeks of age, however, NOD mice start becoming hyperglycemic, indicating the destruction of the majority of their pancreatic beta cells and the corresponding inability of the pancreas to produce sufficient insulin. Thus, both the cause and the progression of the disease are similar to human IDDM patients.

[1356] In vivo assays of efficacy of the immunization regimens can be assessed in female NOD/LtJ mice (commercially available from The Jackson Laboratory, Bar Harbor, Me.). In the literature, it's reported that 80% of female mice develop diabetes by 24 weeks of age and onset of insulitis begins between 6-8 weeks age. NOD mice are inbred and highly responsive to a variety of immunoregulatory strategies. Adult NOD mice (6-8 weeks of age) have an average mass of 20-25 g.

[1357] These mice can be either untreated (control), treated with the therapeutics of the subject invention (e.g., albumin fusion proteins of the invention and fragments and variants thereof), alone or in combination with other therapeutic compounds stated above. The effect of these various treatments on the progression of diabetes can be measured as follows:

[1358] At 14 weeks of age, the female NOD mice can be phenotyped according to glucose tolerance. Glucose tolerance can be measured with the intraperitoneal glucose tolerance test (IPGTT). Briefly, blood is drawn from the paraorbital plexus at 0 minutes and 60 minutes after the intraperitoneal injection of glucose (1 g/kg body weight). Normal tolerance is defined as plasma glucose at 0 minutes of less than 144 mg %, or at 60 minutes of less than 160 mg %. Blood glucose levels are determined with a Glucometer Elite apparatus.

[1359] Based upon this phenotypic analysis, animals can be allocated to the different experimental groups. In particular, animals with more elevated blood glucose levels can be assigned to the impaired glucose tolerance group. The mice can be fed ad libitum and can be supplied with acidified water (pH 2.3).

[1360] The glucose tolerant and intolerant mice can be further subdivided into control, albumin fusion proteins of the subject invention, and albumin fusion proteins/therapeutic compounds combination groups. Mice in the control group can receive an interperitoneal injection of vehicle daily, six times per week. Mice in the albumin fusion group can receive an interperitoneal injection of the therapeutics of the subject invention (e.g., albumin fusion proteins of the invention and fragments and variants thereof) in vehicle daily, six times per week. Mice in the albumin fusion proteins/therapeutic compounds combination group can receive both albumin fusion proteins and combinations of therapeutic compounds as described above.

[1361] The level of urine glucose in the NOD mice can be determined on a bi-weekly basis using Labstix (Bayer Diagnostics, Hampshire, England). Weight and fluid intake can also be determined on a bi-weekly basis. The onset of diabetes is defined after the appearance of glucosuria on two consecutive determinations. After 10 weeks of treatment, an additional IPGTT can be performed and animals can be sacrificed the following day.

[1362] Over the 10 week course of treatment, control animals in both the glucose tolerant and glucose intolerant groups develop diabetes at a rate of 60% and 86%, respectively (see U.S. Pat. No. 5,866,546, Gross et al.). Thus, high rates of diabetes occur even in NOD mice which are initially glucose tolerant if no intervention is made.

[1363] Results can be confirmed by the measurement of blood glucose levels in NOD mice, before and after treatment. Blood glucose levels are measured as described above in both glucose tolerant and intolerant mice in all groups described.

[1364] In an alternative embodiment, the therapeutics of the subject invention (e.g., specific fusions disclosed as SEQ ID NO:Y and fragments and variants thereof) can be quantified using spectrometric analysis and appropriate protein quantities can be resuspended prior to injection in 50 .mu.l phosphate buffered saline (PBS) per dose. Two injections, one week apart, can be administered subcutaneously under the dorsal skin of each mouse. Monitoring can be performed on two separate occasions prior to immunization and can be performed weekly throughout the treatment and continued thereafter. Urine can be tested for glucose every week (Keto-Diastix.®; Miles Inc., Kankakee, Ill.) and glycosuric mice can be checked for serum glucose (ExacTech.®., MediSense, Inc., Waltham, Mass.). Diabetes is diagnosed when fasting glycemia is greater than 2.5 g/L.

### Example 57

### Histological Examination of NOD Mice

[1365] Histological examination of tissue samples from NOD mice can demonstrate the ability of the compositions of the present invention, and/or a combination of the compositions of the present invention with other therapeutic agents for diabetes, to increase the relative concentration of beta cells in the pancreas. The experimental method is as follows:

[1366] The mice from Example 56 can be sacrificed at the end of the treatment period and tissue samples can be taken from the pancreas. The samples can be fixed in 10% formalin in 0.9% saline and embedded in wax. Two sets of 5 serial 5 .mu.m sections can be cut for immunolabelling at a cutting interval of 150 .mu.m. Sections can be immunolabelled for insulin (guinea pig anti-insulin antisera dilution 1:1000, ICN Thames U.K.) and glucagon (rabbit anti-pancreatic glucagon antisera dilution 1:2000) and detected with peroxidase conjugated anti-guinea pig (Dako, High Wycombe, U.K.) or peroxidase conjugated anti-rabbit antisera (dilution 1:50, Dako).

[1367] The composition of the present invention may or may not have as strong an effect on the visible mass of beta cells as it does on the clinical manifestations of diabetes in glucose tolerant and glucose intolerant animals.

### Example 58

### In Vivo Mouse Model of NIDDM

[1368] Male C57BU6J mice from Jackson Laboratory (Bar Harbor, Me.) can be obtained at 3 weeks of age and fed on conventional chow or diets enriched in either fat (35.5% wt/wt; Bioserv.Frenchtown, N.J.) or fructose (60% wt/wt; Harlan Teklad, Madison, Wis.). The regular chow is composed of 4.5% wt/wt fat, 23% wt/wt protein, 31.9% wt/wt starch, 3.7% wt/wt fructose, and 5.3% wt/wt fiber. The high-fat (lard) diet is composed of 35.5% wt/wt fat, 20% wt/wt protein, 36.4% wt/wt starch, 0.0% wt/wt fructose, and 0.1% wt/wt fiber. The high-fructose diet is composed of 5% wt/wt fat, 20% wt/wt protein, 0.0% wt/wt starch, 60% wt/wt fructose, and 9.4% wt/wt fiber. The mice may be housed no more than five per cage at 22° +/−3° C. temperature- and 50%+/−20% humidity-controlled room with a 12-hour light (6 am to 6 pm)/dark cycle (Luo et al., 1998, Metabolism 47(6): 663-8, “Nongenetic mouse models of non-insulin-dependent diabetes mellitus”; Larsen et al., Diabetes 50(11): 2530-9 (2001), “Systemic administration of the long-acting GLP-1 derivative NN2211 induces lasting and reversible weight loss in both normal and obese rats”). After exposure to the respective diets for 3 weeks, mice can be injected intraperitoneally with either streptozotocin, “STZ” (Sigma, St. Louis, Mo.), at 100 mg/kg body weight or vehicle (0.05 mol/L citric acid, pH 4.5) and kept on the same diet for the next 4 weeks. Under nonfasting conditions, blood is obtained 1, 2, and 4 weeks post-STZ by nipping the distal part of the tail. Samples are used to measure nonfasting plasma glucose and insulin concentrations. Body weight and food intake are recorded weekly.

[1369] To directly determine the effect of the high-fat diet on the ability of insulin to stimulate glucose disposal, the experiments can be initiated on three groups of mice, fat-fed, chow-fed injected with vehicle, and fat-fed injected with STZ at the end of the 7-week period described above. Mice can be fasted for 4 hours before the experiments. In the first series of experiments, mice can be anesthetized with methoxyflurane (Pitman-Moor, Mundelein, Ill.) inhalation. Regular insulin (Sigma) can be injected intravenously ([IV] 0.1 U/kg body weight) through a tail vein, and blood can be collected 3, 6, 9, 12, and 15 minutes after the injection from a different tail vein. Plasma glucose concentrations can be determined on these samples, and the half-life (t½) of glucose disappearance from plasma can be calculated using WinNonlin (Scientific Consulting, Apex, N.C.), a pharmacokinetics/pharmacodynamics software program.

[1370] In the second series of experiments, mice can be anesthetized with intraperitoneal sodium pentobarbital (Sigma). The abdominal cavity is opened, and the main abdominal vein is exposed and catheterized with a 24-gauge IV catheter (Johnson-Johnson Medical, Arlington, Tex.). The catheter is secured to muscle tissue adjacent to the abdominal vein, cut on the bottom of the syringe connection, and hooked to a prefilled PE50 plastic tube, which in turn is connected to a syringe with infusion solution. The abdominal cavity is then sutured closed. With this approach, there would be no blockage of backflow of the blood from the lower part of the body. Mice can be infused continuously with glucose (24.1 mg/kg/min) and insulin (10 mU/kg/min) at an infusion volume of 10 μLmin. Retro-orbital blood samples (70 μL each) can be taken 90, 105, 120, and 135 minutes after the start of infusion for measurement of plasma glucose and insulin concentrations. The mean of these four samples is used to estimate steady-state plasma glucose (SSPG) and insulin (SSPI) concentrations for each animal.

[1371] Finally, experiments to evaluate the ability of the albumin fusion proteins, the therapeutic compositions of the instant application, either alone or in combination with any one or more of the therapeutic drugs listed for the treatment of diabetes mellitus, to decrease plasma glucose can be performed in the following two groups of “NIDDM” mice models that are STZ-injected: (1) fat-fed C57B/J6J, and (2) fructose-fed C57BL/6J. Plasma glucose concentrations of the mice for these studies may range from 255 to 555 mg/dL. Mice are randomly assigned to treatment with either vehicle, albumin fusion therapeutics of the present invention either alone or in combination with any one or more of the therapeutic drugs listed for the treatment of diabetes mellitus. A total of three doses can be administered. Tail vein blood samples can be taken for measurement of the plasma glucose concentration before the first dose and 3 hours after the final dose.

[1372] Plasma glucose concentrations can be determined using the Glucose Diagnostic Kit from Sigma (Sigma No. 315), an enzyme colorimetric assay. Plasma insulin levels can be determined using the Rat Insulin RIA Kit from Linco Research (#RI-13K; St. Charles, Mo.).

### Example 59

### In Vitro H4IIe-SEAP Reporter Assays Establishing Involvement in Insulin Action

[1373] The Various H4IIe Reporters

[1374] H4IIe/rMEP-SEAP: The malic enzyme promoter isolated from rat (rMEP) contains a PPAR-gamma element which is in the insulin pathway. This reporter construct is stably transfected into the liver H4IIe cell-line.

[1375] H4IIe/SREBP-SEAP: The sterol regulatory element binding protein (SREBP-1c) is a transcription factor which acts on the promoters of a number of insulin-responsive genes, for example, fatty acid synthetase (FAS), and which regulates expression of key genes in fatty acid metabolism in fibroblasts, adipocytes, and hepatocytes. SREBP-1c, also known as the adipocyte determination and differentiation factor 1 (ADD-1), is considered as the primary mediator of insulin effects on gene expression in adipose cells. It's activity is modulated by the levels of insulin, sterols, and glucose. This reporter construct is stably transfected into the liver H4IIe cell-line.

[1376] H4IIe/FAS-SEAP: The fatty acid synthetase reporter constructs contain a minimal SREBP-responsive FAS promoter. This reporter construct is stably transfected into the liver H4IIe cell-line.

[1377] H4IIe/PEPCK-SEAP: The phosphoenolpyruvate carboxykinase (PEPCK) promoter is the primary site of hormonal regulation of PEPCK gene transcription modulating PEPCK activity. PEPCK catalyzes a committed and rate-limiting step in hepatic gluconeogenesis and must therefore be carefully controlled to maintain blood glucose levels within normal limits. This reporter construct is stably transfected into the liver H4IIe cell-line.

[1378] These reporter constructs can also be stably transfected into 3T3-L1 fibroblasts and L6 myoblasts. These stable cell-lines are then differentiated into 3T3-L1 adipocytes and L6 myotubes as previously described in Example 13. The differentiated cell-lines can then be used in the SEAP assay described below.

[1379] Growth and Assay Medium

[1380] The growth medium comprises 10% Fetal Bovine Serum (FBS), 10% Calf Serum, 1% NEAA, 1× penicillin/streptomycin, and 0.75 mg/mL G418 (for H4IIe/rFAS-SEAP and H4IIe/SREBP-SEAP) or 0.50 mg/mL G418 (for H4IIe/rMEP-SEAP). For H4IIe/PEPCK-SEAP, the growth medium consists of 10% FBS, 1% penicillin/streptomycin, 15 mM HEPES buffered saline, and 0.50 mg/mL G418.

[1381] The assay medium consists of low glucose DMEM medium (Life Technologies), 1% NEAA, 1× penicillin/streptomycin for the H4IIe/rFAS-SEAP, H4IIe/SREBP-SEAP, H4IIe/rMEP-SEAP reporters. The assay medium for H4IIe/PEPCK-SEAP reporter consists of 0.1% FBS, 1% penicillin/streptomycin, and 15 mM HEPES buffered saline.

[1382] Method

[1383] The 96-well plates are seeded at 75,000 cells/well in 100 μL/well of growth medium until cells in log growth phase become adherent. Cells are starved for 48 hours by replacing growth medium with assay medium, 200 μL/well. (For H4IIe/PEPCK-SEAP cells, assay medium containing 0.5 μM dexamethasone is added at 100 μL/well and incubated for approximately 20 hours). The assay medium is replaced thereafter with 100 μL/well of fresh assay medium, and a 50 μL aliquot of cell supernatant obtained from transfected cell-lines expressing the therapeutics of the subject invention (e.g., albumin fusion proteins of the invention and fragments and variants thereof) is added to the well. Supernatants from empty vector transfected cell-lines are used as negative control. Addition of 10 nM and/or 100 nM insulin to the wells is used as positive control. After 48 hours of incubation, the conditioned media are harvested and SEAP activity measured (Phospha-Light System protocol, Tropix #BP2500). Briefly, samples are diluted 1:4 in dilution buffer and incubated at 65° C. for 30 minutes to inactivate the endogenous non-placental form of SEAP. An aliquot of 50 μL of the diluted samples is mixed with 50 μL of SEAP Assay Buffer which contains a mixture of inhibitors active against the non-placental SEAP isoenzymes and is incubated for another 5 minutes. An aliquot of 50 μL of CSPD chemiluminescent substrate which is diluted 1:20 in Emerald luminescence enhancer is added to the mixture and incubated for 15-20 minutes. Plates are read in a Dynex plate luminometer.

### Example 60

### Transgenic Animals

[1384] The albumin fusion proteins of the invention can also be expressed in transgenic animals. Animals of any species, including, but not limited to, mice, rats, rabbits, hamsters, guinea pigs, pigs, micro-pigs, goats, sheep, cows and non-human primates, e.g., baboons, monkeys, and chimpanzees may be used to generate transgenic animals. In a specific embodiment, techniques described herein or otherwise known in the art, are used to express fusion proteins of the invention in humans, as part of a gene therapy protocol.

[1385] Any technique known in the art may be used to introduce the polynucleotides encoding the albumin fusion proteins of the invention into animals to produce the founder lines of transgenic animals. Such techniques include, but are not limited to, pronuclear microinjection (Paterson et al., Appl. Microbiol. Biotechnol. 40:691-698 (1994); Carver et al., Biotechnology (NY) 11: 1263-1270 (1993); Wright et al., Biotechnology (NY) 9:830-834 (1991); and Hoppe et al., U.S. Pat. No. 4,873,191 (1989)); retrovirus mediated gene transfer into germ lines (Van der Putten et al., Proc. Natl. Acad. Sci., USA 82:6148-6152 (1985)), blastocysts or embryos; gene targeting in embryonic stem cells (Thompson et al., Cell 56:313-321 (1989)); electroporation of cells or embryos (Lo, 1983, Mol. Cell. Biol. 3:1803-1814 (1983)); introduction of the polynucleotides of the invention using a gene gun (see, e.g., Ulmer et al., Science 259:1745 (1993); introducing nucleic acid constructs into embryonic pleuripotent stem cells and transferring the stem cells back into the blastocyst; and sperm-mediated gene transfer (Lavitrano et al., Cell 57:717-723 (1989); etc. For a review of such techniques, see Gordon, “Transgenic Animals,” Intl. Rev. Cytol. 115:171-229 (1989), which is incorporated by reference herein in its entirety.

[1386] Any technique known in the art may be used to produce transgenic clones containing polynucleotides encoding albumin fusion proteins of the invention, for example, nuclear transfer into enucleated oocytes of nuclei from cultured embryonic, fetal, or adult cells induced to quiescence (Campell et al., Nature 380:64-66 (1996); Wilmut et al., Nature 385:810-813 (1997)).

[1387] The present invention provides for transgenic animals that carry the polynucleotides encoding the albumin fusion proteins of the invention in all their cells, as well as animals which carry these polynucleotides in some, but not all their cells, i.e., mosaic animals or chimeric. The transgene may be integrated as a single transgene or as multiple copies such as in concatamers, e.g., head-to-head tandems or head-to-tail tandems. The transgene may also be selectively introduced into and activated in a particular cell type by following, for example, the teaching of Lasko et al. (Lasko et al., Proc. Natl. Acad. Sci. USA 89:6232-6236 (1992)). The regulatory sequences required for such a cell-type specific activation will depend upon the particular cell type of interest, and will be apparent to those of skill in the art. When it is desired that the polynucleotide encoding the fusion protein of the invention be integrated into the chromosomal site of the endogenous gene corresponding to the Therapeutic protein portion or albumin portion of the fusion protein of the invention, gene targeting is preferred. Briefly, when such a technique is to be utilized, vectors containing some nucleotide sequences homologous to the endogenous gene are designed for the purpose of integrating, via homologous recombination with chromosomal sequences, into and disrupting the function of the nucleotide sequence of the endogenous gene. The transgene may also be selectively introduced into a particular cell type, thus inactivating the endogenous gene in only that cell type, by following, for example, the teaching of Gu et al. (Gu et al., Science 265:103-106 (1994)). The regulatory sequences required for such a cell-type specific inactivation will depend upon the particular cell type of interest, and will be apparent to those of skill in the art.

[1388] Once transgenic animals have been generated, the expression of the recombinant gene may be assayed utilizing standard techniques. Initial screening may be accomplished by Southern blot analysis or PCR techniques to analyze animal tissues to verify that integration of the polynucleotide encoding the fusion protein of the invention has taken place. The level of mRNA expression of the polynucleotide encoding the fusion protein of the invention in the tissues of the transgenic animals may also be assessed using techniques which include, but are not limited to, Northern blot analysis of tissue samples obtained from the animal, in situ hybridization analysis, and reverse transcriptase-PCR (rt-PCR). Samples of fusion protein-expressing tissue may also be evaluated immunocytochemically or immunohistochemically using antibodies specific for the fusion protein.

[1389] Once the founder animals are produced, they may be bred, inbred, outbred, or crossbred to produce colonies of the particular animal. Examples of such breeding strategies include, but are not limited to: outbreeding of founder animals with more than one integration site in order to establish separate lines; inbreeding of separate lines in order to produce compound transgenics that express the transgene at higher levels because of the effects of additive expression of each transgene; crossing of heterozygous transgenic animals to produce animals homozygous for a given integration site in order to both augment expression and eliminate the need for screening of animals by DNA analysis; crossing of separate homozygous lines to produce compound heterozygous or homozygous lines; and breeding to place the transgene (i.e., polynucleotide encoding an albumin fusion protein of the invention) on a distinct background that is appropriate for an experimental model of interest.

[1390] Transgenic animals of the invention have uses which include, but are not limited to, animal model systems useful in elaborating the biological function of fusion proteins of the invention and the Therapeutic protein and/or albumin component of the fusion protein of the invention, studying conditions and/or disorders associated with aberrant expression, and in screening for compounds effective in ameliorating such conditions and/or disorders.

### Example 61

### Method of Treatment Using Gene Therapy-Ex Vivo

[1391] One method of gene therapy transplants fibroblasts, which are capable of expressing an albumin fusion protein of the present invention, onto a patient. Generally, fibroblasts are obtained from a subject by skin biopsy. The resulting tissue is placed in tissue-culture medium and separated into small pieces. Small chunks of the tissue are placed on a wet surface of a tissue culture flask, approximately ten pieces are placed in each flask. The flask is turned upside down, closed tight and left at room temperature over night. After 24 hours at room temperature, the flask is inverted and the chunks of tissue remain fixed to the bottom of the flask and fresh media (e.g., Ham's F12 media, with 10% FBS, penicillin and streptomycin) is added. The flasks are then incubated at 37 degree C. for approximately one week.

[1392] At this time, fresh media is added and subsequently changed every several days. After an additional two weeks in culture, a monolayer of fibroblasts emerge. The monolayer is trypsinized and scaled into larger flasks.

[1393] pMV-7 (Kirschmeier, P. T. et al., DNA, 7:219-25 (1988)), flanked by the long terminal repeats of the Moloney murine sarcoma virus, is digested with EcoRI and HindIII and subsequently treated with calf intestinal phosphatase. The linear vector is fractionated on agarose gel and purified, using glass beads.

[1394] Polynucleotides encoding an albumin fusion protein of the invention can be generated using techniques known in the art amplified using PCR primers which correspond to the 5′ and 3′ end sequences and optionally having appropriate restriction sites and initiation/stop codons, if necessary. Preferably, the 5′ primer contains an EcoRI site and the 3′ primer includes a HindIII site. Equal quantities of the Moloney murine sarcoma virus linear backbone and the amplified EcoRI and HindIII fragment are added together, in the presence of T4 DNA ligase. The resulting mixture is maintained under conditions appropriate for ligation of the two fragments. The ligation mixture is then used to transform bacteria HB101, which are then plated onto agar containing kanamycin for the purpose of confirming that the vector has the gene of interest properly inserted.

[1395] The amphotropic pA317 or GP+am12 packaging cells are grown in tissue culture to confluent density in Dulbecco's Modified Eagles Medium (DMEM) with 10% calf serum (CS), penicillin and streptomycin. The MSV vector containing the gene is then added to the media and the packaging cells transduced with the vector. The packaging cells now produce infectious viral particles containing the gene (the packaging cells are now referred to as producer cells).

[1396] Fresh media is added to the transduced producer cells, and subsequently, the media is harvested from a 10 cm plate of confluent producer cells. The spent media, containing the infectious viral particles, is filtered through a millipore filter to remove detached producer cells and this media is then used to infect fibroblast cells. Media is removed from a sub-confluent plate of fibroblasts and quickly replaced with the media from the producer cells. This media is removed and replaced with fresh media. If the titer of virus is high, then virtually all fibroblasts will be infected and no selection is required. If the titer is very low, then it is necessary to use a retroviral vector that has a selectable marker, such as neo or his. Once the fibroblasts have been efficiently infected, the fibroblasts are analyzed to determine whether the albumin fusion protein is produced.

[1397] The engineered fibroblasts are then transplanted onto the host, either alone or after having been grown to confluence on cytodex 3 microcarrier beads.

### Example 62

### Method of Treatment Using Gene Therapy-In Vivo

[1398] Another aspect of the present invention is using in vivo gene therapy methods to treat disorders, diseases and conditions. The gene therapy method relates to the introduction of naked nucleic acid (DNA, RNA, and antisense DNA or RNA) sequences encoding an albumin fusion protein of the invention into an animal. Polynucleotides encoding albumin fusion proteins of the present invention may be operatively linked to (i.e., associated with) a promoter or any other genetic elements necessary for the expression of the polypeptide by the target tissue. Such gene therapy and delivery techniques and methods are known in the art, see, for example, WO90/11092, WO98/11779; U.S. Pat. Nos. 5,693,622, 5,705,151, 5,580,859; Tabata et al., Cardiovasc. Res. 35(3):470-479 (1997); Chao et al., Pharmacol. Res. 35(6):517-522 (1997); Wolff, Neuromuscul. Disord. 7(5):314-318 (1997); Schwartz et al., Gene Ther. 3(5):405-411 (1996); Tsurumi et al., Circulation 94(12):3281-3290 (1996) (incorporated herein by reference).

[1399] The polynucleotide constructs may be delivered by any method that delivers injectable materials to the cells of an animal, such as, injection into the interstitial space of tissues (heart, muscle, skin, lung, liver, intestine and the like). The polynucleotide constructs can be delivered in a pharmaceutically acceptable liquid or aqueous carrier.

[1400] The term “naked” polynucleotide, DNA or RNA, refers to sequences that are free from any delivery vehicle that acts to assist, promote, or facilitate entry into the cell, including viral sequences, viral particles, liposome formulations, lipofectin or precipitating agents and the like. However, polynucleotides encoding albumin fusion proteins of the present invention may also be delivered in liposome formulations (such as those taught in Felgner P. L. et al. (1995) Ann. NY Acad. Sci. 772:126-139 and Abdallah B. et al. (1995) Biol. Cell 85(1):1-7) which can be prepared by methods well known to those skilled in the art.

[1401] The polynucleotide vector constructs used in the gene therapy method are preferably constructs that will not integrate into the host genome nor will they contain sequences that allow for replication. Any strong promoter known to those skilled in the art can be used for driving the expression of DNA. Unlike other gene therapy techniques, one major advantage of introducing naked nucleic acid sequences into target cells is the transitory nature of the polynucleotide synthesis in the cells. Studies have shown that non-replicating DNA sequences can be introduced into cells to provide production of the desired polypeptide for periods of up to six months.

[1402] The polynucleotide construct can be delivered to the interstitial space of tissues within an animal, including muscle, skin, brain, lung, liver, spleen, bone marrow, thymus, heart, lymph, blood, bone, cartilage, pancreas, kidney, gall bladder, stomach, intestine, testis, ovary, uterus, rectum, nervous system, eye, gland, and connective tissue. Interstitial space of the tissues comprises the intercellular fluid, mucopolysaccharide matrix among the reticular fibers of organ tissues, elastic fibers in the walls of vessels or chambers, collagen fibers of fibrous tissues, or that same matrix within connective tissue ensheathing muscle cells or in the lacunae of bone. It is similarly the space occupied by the plasma of the circulation and the lymph fluid of the lymphatic channels. Delivery to the interstitial space of muscle tissue is preferred for the reasons discussed below. They may be conveniently delivered by injection into the tissues comprising these cells. They are preferably delivered to and expressed in persistent, non-dividing cells which are differentiated, although delivery and expression may be achieved in non-differentiated or less completely differentiated cells, such as, for example, stem cells of blood or skin fibroblasts. In vivo muscle cells are particularly competent in their ability to take up and express polynucleotides.

[1403] For the naked polynucleotide injection, an effective dosage amount of DNA or RNA will be in the range of from about 0.05 g/kg body weight to about 50 mg/kg body weight. Preferably the dosage will be from about 0.005 mg/kg to about 20 mg/kg and more preferably from about 0.05 mg/kg to about 5 mg/kg. Of course, as the artisan of ordinary skill will appreciate, this dosage will vary according to the tissue site of injection. The appropriate and effective dosage of nucleic acid sequence can readily be determined by those of ordinary skill in the art and may depend on the condition being treated and the route of administration. The preferred route of administration is by the parenteral route of injection into the interstitial space of tissues. However, other parenteral routes may also be used, such as, inhalation of an aerosol formulation particularly for delivery to lungs or bronchial tissues, throat or mucous membranes of the nose. In addition, naked polynucleotide constructs can be delivered to arteries during angioplasty by the catheter used in the procedure.

[1404] The dose response effects of injected polynucleotide in muscle in vivo is determined as follows. Suitable template DNA for production of mRNA coding for polypeptide of the present invention is prepared in accordance with a standard recombinant DNA methodology. The template DNA, which may be either circular or linear, is either used as naked DNA or complexed with liposomes. The quadriceps muscles of mice are then injected with various amounts of the template DNA.

[1405] Five to six week old female and male Balb/C mice are anesthetized by intraperitoneal injection with 0.3 ml of 2.5% Avertin. A 1.5 cm incision is made on the anterior thigh, and the quadriceps muscle is directly visualized. The template DNA is injected in 0.1 ml of carrier in a 1 cc syringe through a 27 gauge needle over one minute, approximately 0.5 cm from the distal insertion site of the muscle into the knee and about 0.2 cm deep. A suture is placed over the injection site for future localization, and the skin is closed with stainless steel clips.

[1406] After an appropriate incubation time (e.g., 7 days) muscle extracts are prepared by excising the entire quadriceps. Every fifth 15 um cross-section of the individual quadriceps muscles is histochemically stained for protein expression. A time course for fusion protein expression may be done in a similar fashion except that quadriceps from different mice are harvested at different times. Persistence of DNA in muscle following injection may be determined by Southern blot analysis after preparing total cellular DNA and HIRT supernatants from injected and control mice. The results of the above experimentation in mice can be used to extrapolate proper dosages and other treatment parameters in humans and other animals using naked DNA.

### Example 63

### Biological Effects of Fusion Proteins of the Invention

[1407] Astrocyte and Neuronal Assays.

[1408] Albumin fusion proteins of the invention can be tested for activity in promoting the survival, neurite outgrowth, or phenotypic differentiation of cortical neuronal cells and for inducing the proliferation of glial fibrillary acidic protein immunopositive cells, astrocytes. The selection of cortical cells for the bioassay is based on the prevalent expression of FGF-1 and FGF-2 in cortical structures and on the previously reported enhancement of cortical neuronal survival resulting from FGF-2 treatment. A thymidine incorporation assay, for example, can be used to elucidate an albumin fusion protein of the invention's activity on these cells.

[1409] Moreover, previous reports describing the biological effects of FGF-2 (basic FGF) on cortical or hippocampal neurons in vitro have demonstrated increases in both neuron survival and neurite outgrowth (Walicke et al., “Fibroblast growth factor promotes survival of dissociated hippocampal neurons and enhances neurite extension.” Proc. Natl. Acad. Sci. USA 83:3012-3016. (1986), assay herein incorporated by reference in its entirety). However, reports from experiments done on PC-12 cells suggest that these two responses are not necessarily synonymous and may depend on not only which FGF is being tested but also on which receptor(s) are expressed on the target cells. Using the primary cortical neuronal culture paradigm, the ability of an albumin fusion protein of the invention to induce neurite outgrowth can be compared to the response achieved with FGF-2 using, for example, a thymidine incorporation assay.

[1410] Fibroblast and Endothelial Cell Assays.

[1411] Human lung fibroblasts are obtained from Clonetics (San Diego, Calif.) and maintained in growth media from Clonetics. Dermal microvascular endothelial cells are obtained from Cell Applications (San Diego, Calif.). For proliferation assays, the human lung fibroblasts and dermal microvascular endothelial cells can be cultured at 5,000 cells/well in a 96-well plate for one day in growth medium. The cells are then incubated for one day in 0.1% BSA basal medium. After replacing the medium with fresh 0.1% BSA medium, the cells are incubated with the test fusion protein of the invention proteins for 3 days. Alamar Blue (Alamar Biosciences, Sacramento, Calif.) is added to each well to a final concentration of 10%. The cells are incubated for 4 hr. Cell viability is measured by reading in a CytoFluor fluorescence reader. For the PGE₂ assays, the human lung fibroblasts are cultured at 5,000 cells/well in a 96-well plate for one day. After a medium change to 0.1% BSA basal medium, the cells are incubated with FGF-2 or fusion protein of the invention with or without IL-1α for 24 hours. The supernatants are collected and assayed for PGE₂ by EIA kit (Cayman, Ann Arbor, Mich.). For the IL-6 assays, the human lung fibroblasts are cultured at 5,000 cells/well in a 96-well plate for one day. After a medium change to 0.1% BSA basal medium, the cells are incubated with FGF-2 or with or without an albumin fusion protein of the invention and/or IL-1α for 24 hours. The supernatants are collected and assayed for IL-6 by ELISA kit (Endogen, Cambridge, Mass.).

[1412] Human lung fibroblasts are cultured with FGF-2 or an albumin fusion protein of the invention for 3 days in basal medium before the addition of Alamar Blue to assess effects on growth of the fibroblasts. FGF-2 should show a stimulation at 10-2500 ng/ml which can be used to compare stimulation with the fusion protein of the invention.

[1413] Cell Proliferation Based on [3H]Thymidine Incorporation

[1414] The following [3H]Thymidine incorporation assay can be used to measure the effect of a Therapeutic proteins, e.g., growth factor proteins, on the proliferation of cells such as fibroblast cells, epithelial cells or immature muscle cells.

[1415] Sub-confluent cultures are arrested in G1 phase by an 18 h incubation in serum-free medium. Therapeutic proteins are then added for 24 h and during the last 4 h, the cultures are labeled with [3H]thymidine, at a final concentration of 0.33 μM (25 Ci/mmol, Amersham, Arlington Heights, Ill.). The incorporated [3H]thymidine is precipitated with ice-cold 10% trichloroacetic acid for 24 h. Subsequently, the cells are rinsed sequentially with ice-cold 10% trichloroacetic acid and then with ice-cold water. Following lysis in 0.5 M NaOH, the lysates and PBS rinses (500 ml) are pooled, and the amount of radioactivity is measured.

[1416] Parkinson Models.

[1417] The loss of motor function in Parkinson's disease is attributed to a deficiency of striatal dopamine resulting from the degeneration of the nigrostriatal dopaminergic projection neurons. An animal model for Parkinson's that has been extensively characterized involves the systemic administration of 1-methyl-4 phenyl 1,2,3,6-tetrahydropyridine (MPTP). In the CNS, MPTP is taken-up by astrocytes and catabolized by monoamine oxidase B to 1-methyl-4-phenyl pyridine (MPP⁺) and released. Subsequently, MPP⁺ is actively accumulated in dopaminergic neurons by the high-affinity reuptake transporter for dopamine. MPP⁺ is then concentrated in mitochondria by the electrochemical gradient and selectively inhibits nicotidamide adenine disphosphate: ubiquinone oxidoreductionase (complex I), thereby interfering with electron transport and eventually generating oxygen radicals.

[1418] It has been demonstrated in tissue culture paradigms that FGF-2 (basic FGF) has trophic activity towards nigral dopaminergic neurons (Ferrari et al., Dev. Biol. 1989). Recently, Dr. Unsicker's group has demonstrated that administering FGF-2 in gel foam implants in the striatum results in the near complete protection of nigral dopaminergic neurons from the toxicity associated with MPTP exposure (Otto and Unsicker, J. Neuroscience, 1990).

[1419] Based on the data with FGF-2, an albumin fusion protein of the invention can be evaluated to determine whether it has an action similar to that of FGF-2 in enhancing dopaminergic neuronal survival in vitro and it can also be tested in vivo for protection of dopaminergic neurons in the striatum from the damage associated with MPTP treatment. The potential effect of an albumin fusion protein of the invention is first examined in vitro in a dopaminergic neuronal cell culture paradigm. The cultures are prepared by dissecting the midbrain floor plate from gestation day 14 Wistar rat embryos. The tissue is dissociated with trypsin and seeded at a density of 200,000 cells/cm² on polyorthinine-laminin coated glass coverslips. The cells are maintained in Dulbecco's Modified Eagle's medium and F12 medium containing hormonal supplements (Ni). The cultures are fixed with paraformaldehyde after 8 days in vitro and are processed for tyrosine hydroxylase, a specific marker for dopaminergic neurons, immunohistochemical staining. Dissociated cell cultures are prepared from embryonic rats. The culture medium is changed every third day and the factors are also added at that time.

[1420] Since the dopaminergic neurons are isolated from animals at gestation day 14, a developmental time which is past the stage when the dopaminergic precursor cells are proliferating, an increase in the number of tyrosine hydroxylase immunopositive neurons would represent an increase in the number of dopaminergic neurons surviving in vitro. Therefore, if a therapeutic protein of the invention acts to prolong the survival of dopaminergic neurons, it would suggest that the fusion protein may be involved in Parkinson's Disease.

### Example 64

### Pancreatic Beta-Cell Transplantation Combination Therapy

[1421] Transplantation is a common form of treatment of autoimmune disease, especially when the target self tissue has been severely damaged. For example, and not by way of limitation, pancreas transplantation and islet cell transplantation are common treatment options for IDDM (See, e.g., Stewart et al., Journal of Clinical Endocrinology & Metabolism 86 (3): 984-988 (2001); Brunicardi, Transplant. Proc. 28: 2138-40 (1996); Kendall & Robertson, Diabetes Metab. 22: 157-163 (1996); Hamano et al., Kobe J. Med. Sci. 42: 93-104 (1996); Larsen & Stratta, Diabetes Metab. 22: 139-146 (1996); and Kinkhabwala, et al., Am. J. Surg. 171: 516-520 (1996)). As with any transplantation method, transplantation therapies for autoimmune disease patients include treatments to minimize the risk of host rejection of the transplanted tissue. However, autoimmune disease involves the additional, independent risk that the pre-existing host autoimmune response which damaged the original self tissue will exert the same damaging effect on the transplanted tissue. Accordingly, the present invention encompasses methods and compositions for the treatment of autoimmune pancreatic disease using the albumin fusion proteins of the subject invention in combination with immunomodulators/immunosuppressants in individuals undergoing transplantation therapy of the autoimmune disease.

[1422] In accordance with the invention, the albumin fusion-based compositions and formulations described above, are administered to prevent and treat damage to the transplanted organ, tissue, or cells resulting from the host individual's autoimmune response initially directed against the original self tissue. Administration may be carried out both prior and subsequent to transplantation in 2 to 4 doses each one week apart.

[1423] The following immunomodulators/immunosuppressants including, but not limited to, AI-401, CDP-571 (anti-TNF monoclonal antibody), CG-1088, Diamyd (diabetes vaccine), ICM3 (anti-ICAM-3 monoclonal antibody), linomide (Roquinimex), NBI-6024 (altered peptide ligand), TM-27, VX-740 (HMR-3480), caspase 8 protease inhibitors, thalidomide, hOKT3gamma1 (Ala-ala) (anti-CD3 monoclonal antibody), Oral Interferon-Alpha, oral lactobacillus, and LymphoStat-B™ can be used together with the albumin fusion therapeutics of the subject invention in islet cell or pancreas transplantation.

### Example 65

### Identification and Cloning of VH and VL Domains

[1424] One method to identfy and clone VH and VL domains from cell lines expressing a particular antibody is to perform PCR with VH and VL specific primers on cDNA made from the antibody expressing cell lines. Briefly, RNA is isolated from the cell lines and used as a template for RT-PCR designed to amplify the VH and VL domains of the antibodies expressed by the EBV cell lines. Cells may be lysed in the TRIzol® reagent (Life Technologies, Rockville. MD) and extracted with one fifth volume of chloroform. After addition of chloroform, the solution is allowed to incubate at room temperature for 10 minutes, and the centrifuged at 14,000 rpm for 15 minutes at 4° C. in a tabletop centrifuge. The supernatant is collected and RNA is precipitated using an equal volume of isopropanol. Precipitated RNA is pelleted by centrifuging at 14,000 rpm for 15 minutes at 4° C. in a tabletop centrifuge. Following centrifugation, the supernatant is discarded and washed with 75% ethanol. Following washing, the RNA is centrifuged again at 800 rpm for 5 minutes at 4° C. The supernatant is discarded and the pellet allowed to air dry. RNA is the dissolved in DEPC water and heated to 60° C. for 10 minutes. Quantities of RNA can determined using optical density measurements.

[1425] cDNA may be synthesized, according to methods well-known in the art, from 1.5-2.5 micrograms of RNA using reverse transciptase and random hexamer primers. cDNA is then used as a template for PCR amplification of VH and VL domains. Primers used to amplify VH and VL genes are shown in Table 7. Typically a PCR reaction makes use of a single 5′ primer and a single 3′ primer. Sometimes, when the amount of available RNA template is limiting, or for greater efficiency, groups of 5′ and/or 3′ primers may be used. For example, sometimes all five VH-5′ primers and all JH3′ primers are used in a single PCR reaction. The PCR reaction is carried out in a 50 microliter volume containing 1×PCR buffer, 2 mM of each dNTP, 0.7 units of High Fidelity Taq polymerse, 5′ primer mix, 3′ primer mix and 7.5 microliters of cDNA. The 5′ and 3′ primer mix of both VH and VL can be made by pooling together 22 pmole and 28 pmole, respectively, of each of the individual primers. PCR conditions are: 96° C. for 5 minutes; followed by 25 cycles of 94° C. for 1 minute, 50° C. for 1 minute, and 72° C. for 1 minute; followed by an extension cycle of 72° C. for 10 minutes. After the reaction is completed, sample tubes are stored 4° C.

TABLE 7

Primer Sequences Used to Amplify VH and VL
domains.

| | | |
|---|---|---|
| Primer name | SEQ ID NO | Primer Sequence (5′-3′) |

| | | |
|---|---|---|
| VH Primers | | |
| Hu VH1-5′ | 62 | CAGGTGCAGCTGGTGCAGTCTGG |
| Hu VH2-5′ | 63 | CAGGTCAACTTAAGGGAGTCTGG |
| Hu VH3-5′ | 64 | GAGGTGCAGCTGGTGGAGTCTGG |
| Hu VH4-5′ | 65 | CAGGTGCAGCTGCAGGAGTCGGG |
| Hu VH5-5′ | 66 | GAGGTGCAGCTGTTGCAGTCTGC |
| Hu VH6-5′ | 67 | CAGGTACAGCTGCAGCAGTCAGG |
| Hu JH1,2-5′ | 68 | TGAGGAGACGGTGACCAGGGTGCC |
| Hu JH3-5′ | 69 | TGAAGAGACGGTGACCATTGTCCC |
| Hu JH4,5-5′ | 70 | TGAGGAGACGGTGACCAGGGTTCC |
| Hu JH6-5′ | 71 | TGAGGAGACGGTGACCGTGGTCCC |
| VL Primers | | |
| Hu Vkappa1-5′ | 72 | GACATCCAGATGACCCAGTCTCC |
| Hu Vkappa2a-5′ | 73 | GATGTTGTGATGACTCAGTCTCC |
| Hu Vkappa2b-5′ | 74 | GATATTGTGATGACTCAGTCTCC |
| Hu Vkappa3-5′ | 75 | GAAATTGTGTTGACGCAGTCTCC |
| Hu Vkappa4-5′ | 76 | GACATCGTGATGACCCAGTCTCC |
| Hu Vkappa5-5′ | 77 | GAAACGACACTCACGCAGTCTCC |
| Hu Vkappa6-5′ | 78 | GAAATTGTGCTGACTCAGTCTCC |
| Hu Vlambda1-5′ | 79 | CAGTCTGTGTTGACGCAGCCGCC |
| Hu Vlambda2-5′ | 80 | CAGTCTGCCCTGACTCAGCCTGC |
| Hu Vlambda3-5′ | 81 | TCCTATGTGCTGACTCAGCCACC |
| Hu Vlambda3b-5′ | 82 | TCTTCTGAGCTGACTCAGGACCC |
| Hu Vlambda4-5′ | 83 | CACGTTATACTGACTCAACCGCC |
| Hu Vlambda5-5′ | 84 | CAGGCTGTGCTCACTCAGCCGTC |
| Hu Vlambda6-5′ | 85 | AATTTTATGCTGACTCAGCCCCA |
| Hu Jkappa1-3′ | 86 | ACGTTTGATTTCCACCTTGGTCCC |
| Hu Jkappa2-3′ | 87 | ACGTTTGATCTCCAGCTTGGTCCC |
| Hu Jkappa3-3′ | 88 | ACGTTTGATATCCACTTTGGTCCC |
| Hu Jkappa4-3′ | 89 | ACGTTTGATCTCCACCTTGGTCCC |
| Hu Jkappa5-3′ | 90 | ACGTTTAATCTCCAGTCGTGTCCC |
| Hu Jlambda1-3′ | 91 | CAGTCTGTGTTGACGCAGCCGCC |
| Hu Jlambda2-3′ | 92 | CAGTCTGCCCTGACTCAGCCTGC |
| Hu Jlambda3--3′ | 93 | TCCTATGTGCTGACTCAGCCACC |
| Hu Jlambda3b-3′ | 94 | TCTTCTGAGCTGACTCAGGACCC |
| Hu Jlambda4-3′ | 95 | CACGTTATACTGACTCAACCGCC |
| Hu Jlambda5-3′ | 96 | CAGGCTGTGCTCACTCAGCCGTC |
| Hu Jlambda6-3′ | 97 | AATTTTATGCTGACTCAGCCCCA |

PCR samples are then electrophoresed on a 1.3% agarose gel. DNA bands of the expected sizes (˜506 base pairs for VH domains, and 344 base pairs for VL domains) can be cut out of the gel and purified using methods well known in the art. Purified PCR products can be ligated into a PCR cloning vector (TA vector from Invitrogen Inc., Carlsbad, Calif.). Individual cloned PCR products can be isolated after transfection of E. coli and blue/white color selection. Cloned PCR products may then be sequenced using methods commonly known in the art.

[1426] The PCR bands containing the VH domain and the VL domains can also be used to create full-length Ig expression vectors. VH and VL domains can be cloned into vectors containing the nucleotide sequences of a heavy (e.g., human IgG1 or human IgG4) or light chain (human kappa or human lambda) constant regions such that a complete heavy or light chain molecule could be expressed from these vectors when transfected into an appropriate host cell. Further, when cloned heavy and light chains are both expressed in one cell line (from either one or two vectors), they can assemble into a complete functional antibody molecule that is secreted into the cell culture medium. Methods using polynucleotides encoding VH and VL antibody domain to generate expression vectors that encode complete antibody molecules are well known within the art.

### Example 66

### Preparation of HA-Cytokine or HA-Growth Factor Fusion Proteins (Such as NGF, BDNFa, BDNFb and BDNFc)

[1427] The cDNA for the cytokine or growth factor of interest, such as NGF, can be isolated by a variety of means including from cDNA libraries, by RT-PCR and by PCR using a series of overlapping synthetic oligonucleotide primers, all using standard methods. The nucleotide sequences for all of these proteins are known and available. The cDNA can be tailored at the 5′ and 3′ ends to generate restriction sites, such that oligonucleotide linkers can be used, for cloning of the cDNA into a vector containing the cDNA for HA. This can be at the N or C-terminus with or without the use of a spacer sequence. NGF (or other cytokine) cDNA is cloned into a vector such as pPPC0005 (FIG. 2), pScCHSA, pScNHSA, or pC4:HSA from which the complete expression cassette is then excised and inserted into the plasmid pSAC35 to allow the expression of the albumin fusion protein in yeast. The albumin fusion protein secreted from the yeast can then be collected and purified from the media and tested for its biological activity. For expression in mammalian cell lines, a similar procedure is adopted except that the expression cassette used employs a mammalian promoter, leader sequence and terminator (See Example 1). This expression cassette is then excised and inserted into a plasmid suitable for the transfection of mammalian cell lines.

### Example 67

### Preparation of HA-IFN Fusion Proteins (Such as IFNα)

[1428] The cDNA for the interferon of interest such as IFNα can be isolated by a variety of means including but not exclusively, from cDNA libraries, by RT-PCR and by PCR using a series of overlapping synthetic oligonucleotide primers, all using standard methods. The nucleotide sequences for interferons, such as IFNα are known and available, for instance, in U.S. Pat. Nos. 5,326,859 and 4,588,585, in EP 32 134, as well as in public databases such as GenBank. The cDNA can be tailored at the 5′ and 3′ ends to generate restriction sites, such that oligonucleotide linkers can be used to clone the cDNA into a vector containing the cDNA for HA. This can be at the N or C-terminus of the HA sequence, with or without the use of a spacer sequence. The IFNα (or other interferon) cDNA is cloned into a vector such as pPPC0005 (FIG. 2), pScCHSA, pScNHSA, or pC4:HSA from which the complete expression cassette is then excised and inserted into the plasmid pSAC35 to allow the expression of the albumin fusion protein in yeast. The albumin fusion protein secreted from the yeast can then be collected and purified from the media and tested for its biological activity. For expression in mammalian cell lines a similar procedure is adopted except that the expression cassette used employs a mammalian promoter, leader sequence and terminator (See Example 1). This expression cassette is then excised and inserted into a plasmid suitable for the transfection of mammalian cell lines.

[1429] Maximum Protein Recovery from Vials

[1430] The albumin fusion proteins of the invention have a high degree of stability even when they are packaged at low concentrations. In addition, in spite of the low protein concentration, good fusion-protein recovery is observed even when the aqueous solution includes no other protein added to minimize binding to the vial walls. The recovery of vial-stored HA-IFN solutions was compared with a stock solution. 6 or 30 μg/ml HA-IFN solutions were placed in vials and stored at 4° C. After 48 or 72 hrs a volume originally equivalent to 10 ng of sample was removed and measured in an IFN sandwich ELISA. The estimated values were compared to that of a high concentration stock solution. As shown, there is essentially no loss of the sample in these vials, indicating that addition of exogenous material such as albumin is not necessary to prevent sample loss to the wall of the vials

[1431] In Vivo Stability and Bioavailability of Ha-α-IFN Fusions

[1432] To determine the in vivo stability and bioavailability of a HA-α-IFN fusion molecule, the purified fusion molecule (from yeast) was administered to monkeys. Pharmaceutical compositions formulated from HA-α-IFN fusions may account for the extended serum half-life and bioavailability. Accordingly, pharmaceutical compositions may be formulated to contain lower dosages of alpha-interferon activity compared to the native alpha-interferon molecule.

[1433] Pharmaceutical compositions containing HA-α-IFN fusions may be used to treat or prevent disease in patients with any disease or disease state that can be modulated by the administration of α-IFN. Such diseases include, but are not limited to, hairy cell leukemia, Kaposi's sarcoma, genital and anal warts, chronic hepatitis B, chronic non-A, non-B hepatitis, in particular hepatitis C, hepatitis D, chronic myelogenous leukemia, renal cell carcinoma, bladder carcinoma, ovarian and cervical carcinoma, skin cancers, recurrent respirator papillomatosis, non-Hodgkin's and cutaneous T-cell lymphomas, melanoma, multiple myeloma, AIDS, multiple sclerosis, glioblastoma, etc. (see Interferon Alpha, In: AHFS Drug Information, 1997.

[1434] Accordingly, the invention includes pharmaceutical compositions containing a HA-α-IFN fusion protein, polypeptide or peptide formulated with the proper dosage for human administration. The invention also includes methods of treating patients in need of such treatment comprising at least the step of administering a pharmaceutical composition containing at least one HA-α-IFN fusion protein, polypeptide or peptide.

[1435] Bifunctional HA-□-IFN Fusions

[1436] A HA-α-IFN expression vector may be modified to include an insertion for the expression of bifunctional HA-α-IFN fusion proteins. For instance, the cDNA for a second protein of interest may be inserted in frame downstream of the “rHA-IFN” sequence after the double stop codon has been removed or shifted downstream of the coding sequence.

[1437] In one version of a bifunctional HA-α-IFN fusion protein, an antibody or fragment against B-lymphocyte stimulator protein (GenBank Acc 4455139) or polypeptide may be fused to one end of the HA component of the fusion molecule. This bifunctional protein is useful for modulating any immune response generated by the α-IFN component of the fusion.

### Example 68

### Preparation of HA-Hormone Fusion Protein

[1438] The cDNA for the hormone of interest can be isolated by a variety of means including but not exclusively, from cDNA libraries, by RT-PCR and by PCR using a series of overlapping synthetic oligonucleotide primers, all using standard methods. The nucleotide sequences for all of these proteins are known and available, for instance, in public databases such as GenBank. The cDNA can be tailored at the 5′ and 3′ ends to generate restriction sites, such that oligonucleotide linkers can be used, for cloning of the cDNA into a vector containing the cDNA for HA. This can be at the N or C-terminus with or without the use of a spacer sequence. The hormone cDNA is cloned into a vector such as pPPC0005 (FIG. 2), pScCHSA, pScNHSA, or pC4:HSA from which the complete expression cassette is then excised and inserted into the plasmid pSAC35 to allow the expression of the albumin fusion protein in yeast. The albumin fusion protein secreted from the yeast can then be collected and purified from the media and tested for its biological activity. For expression in mammalian cell lines a similar procedure is adopted except that the expression cassette used employs a mammalian promoter, leader sequence and terminator (See Example 1). This expression cassette is then excised and inserted into a plasmid suitable for the transfection of mammalian cell lines.

### Example 69

### Preparation of HA-Soluble Receptor or HA-Binding Protein Fusion Protein

[1439] The cDNA for the soluble receptor or binding protein of interest can be isolated by a variety of means including but not exclusively, from cDNA libraries, by RT-PCR and by PCR using a series of overlapping synthetic oligonucleotide primers, all using standard methods. The nucleotide sequences for all of these proteins are known and available, for instance, in GenBank. The cDNA can be tailored at the 5′ and 3′ ends to generate restriction sites, such that oligonucleotide linkers can be used, for cloning of the cDNA into a vector containing the cDNA for HA. This can be at the N or C-terminus with or without the use of a spacer sequence. The receptor cDNA is cloned into a vector such as pPPC0005 (FIG. 2), pScCHSA, pScNHSA, or pC4:HSA from which the complete expression cassette is then excised and inserted into the plasmid pSAC35 to allow the expression of the albumin fusion protein in yeast. The albumin fusion protein secreted from the yeast can then be collected and purified from the media and tested for its biological activity. For expression in mammalian cell lines a similar procedure is adopted except that the expression cassette used employs a mammalian promoter, leader sequence and terminator (See Example 1). This expression cassette is then excised and inserted into a plasmid suitable for the transfection of mammalian cell lines.

### Example 70

### Preparation of HA-Growth Factors

[1440] The cDNA for the growth factor of interest can be isolated by a variety of means including but not exclusively, from cDNA libraries, by RT-PCR and by PCR using a series of overlapping synthetic oligonucleotide primers, all using standard methods (see GenBank Acc. No. NP_{—}000609). The cDNA can be tailored at the 5′ and 3′ ends to generate restriction sites, such that oligonucleotide linkers can be used, for cloning of the cDNA into a vector containing the cDNA for HA. This can be at the N or C-terminus with or without the use of a spacer sequence. The growth factor cDNA is cloned into a vector such as pPPC0005 (FIG. 2), pScCHSA, pScNHSA, or pC4:HSA from which the complete expression cassette is then excised and inserted into the plasmid pSAC35 to allow the expression of the albumin fusion protein in yeast. The albumin fusion protein secreted from the yeast can then be collected and purified from the media and tested for its biological activity. For expression in mammalian cell lines a similar procedure is adopted except that the expression cassette used employs a mammalian promoter, leader sequence and terminator (See Example 1). This expression cassette is then excised and inserted into a plasmid suitable for the transfection of mammalian cell lines.

### Example 71

### Preparation of HA-Single Chain Antibody Fusion Proteins

[1441] Single chain antibodies are produced by several methods including but not limited to: selection from phage libraries, cloning of the variable region of a specific antibody by cloning the cDNA of the antibody and using the flanking constant regions as the primer to clone the variable region, or by synthesizing an oligonucleotide corresponding to the variable region of any specific antibody. The cDNA can be tailored at the 5′ and 3′ ends to generate restriction sites, such that oligonucleotide linkers can be used, for cloning of the cDNA into a vector containing the cDNA for HA. This can be at the N or C-terminus with or without the use of a spacer sequence. The cell cDNA is cloned into a vector such as pPPC0005 (FIG. 2), pScCHSA, pScNHSA, or pC4:HSA from which the complete expression cassette is then excised and inserted into the plasmid pSAC35 to allow the expression of the albumin fusion protein in yeast.

[1442] In fusion molecules of the invention, the V_{H} and V_{L} can be linked by one of the following means or a combination thereof: a peptide linker between the C-terminus of the V_{H} and the N-terminus of the V_{L}; a Kex2p protease cleavage site between the V_{H} and V_{L} such that the two are cleaved apart upon secretion and then self associate; and cystine residues positioned such that the V_{H} and V_{L} can form a disulphide bond between them to link them together. An alternative option would be to place the V_{H} at the N-terminus of HA or an HA domain fragment and the V_{L} at the C-terminus of the HA or HA domain fragment.

[1443] The albumin fusion protein secreted from the yeast can then be collected and purified from the media and tested for its activity. For expression in mammalian cell lines a similar procedure is adopted except that the expression cassette used employs a mammalian promoter, leader sequence and terminator (See Example 1). This expression cassette is then excised and inserted into a plasmid suitable for the transfection of mammalian cell lines. The antibody produced in this manner can be purified from media and tested for its binding to its antigen using standard immunochemical methods.

### Example 72

### Preparation of HA-Cell Adhesion Molecule Fusion Proteins

[1444] The cDNA for the cell adhesion molecule of interest can be isolated by a variety of means including but not exclusively, from cDNA libraries, by RT-PCR and by PCR using a series of overlapping synthetic oligonucleotide primers, all using standard methods. The nucleotide sequences for the known cell adhesion molecules are known and available, for instance, in GenBank. The cDNA can be tailored at the 5′ and 3′ ends to generate restriction sites, such that oligonucleotide linkers can be used, for cloning of the cDNA into a vector containing the cDNA for HA. This can be at the N or C-terminus with or without the use of a spacer sequence. The cell adhesion molecule cDNA is cloned into a vector such as pPPC0005 (FIG. 2), pScCHSA, pScNHSA, or pC4:HSA from which the complete expression cassette is then excised and inserted into the plasmid pSAC35 to allow the expression of the albumin fusion protein in yeast. The albumin fusion protein secreted from the yeast can then be collected and purified from the media and tested for its biological activity. For expression in mammalian cell lines a similar procedure is adopted except that the expression cassette used employs a mammalian promoter, leader sequence and terminator (See Example 1). This expression cassette is then excised and inserted into a plasmid suitable for the transfection of mammalian cell lines.

### Example 73

### Preparation of Inhibitory Factors and Peptides as HA Fusion Proteins (Such as HA-Antiviral, HA-Antibiotic, HA-Enzyme Inhibitor and HA-Anti-Allergic Proteins)

[1445] The cDNA for the peptide of interest such as an antibiotic peptide can be isolated by a variety of means including but not exclusively, from cDNA libraries, by RT-PCR and by PCR using a series of overlapping synthetic oligonucleotide primers, all using standard methods. The cDNA can be tailored at the 5′ and 3′ ends to generate restriction sites, such that oligonucleotide linkers can be used, for cloning of the cDNA into a vector containing the cDNA for HA. This can be at the N or C-terminus with or without the use of a spacer sequence. The peptide cDNA is cloned into a vector such as pPPC0005 (FIG. 2), pScCHSA, pScNHSA, or pC4:HSA from which the complete expression cassette is then excised and inserted into the plasmid pSAC35 to allow the expression of the albumin fusion protein in yeast. The albumin fusion protein secreted from the yeast can then be collected and purified from the media and tested for its biological activity. For expression in mammalian cell lines a similar procedure is adopted except that the expression cassette used employs a mammalian promoter, leader sequence and terminator (See Example 1). This expression cassette is then excised and inserted into a plasmid suitable for the transfection of mammalian cell lines.

### Example 74

### Preparation of Targeted HA Fusion Proteins

[1446] The cDNA for the protein of interest can be isolated from cDNA library or can be made synthetically using several overlapping oligonucleotides using standard molecular biology methods. The appropriate nucleotides can be engineered in the cDNA to form convenient restriction sites and also allow the attachment of the protein cDNA to albumin cDNA. Also a targeting protein or peptide cDNA such as single chain antibody or peptides, such as nuclear localization signals, that can direct proteins inside the cells can be fused to the other end of albumin. The protein of interest and the targeting peptide is cloned into a vector such as pPPC0005 (FIG. 2), pScCHSA, pScNHSA, or pC4:HSA which allows the fusion with albumin cDNA. In this manner both N- and C-terminal end of albumin are fused to other proteins. The fused cDNA is then excised from pPPC0005 and is inserted into a plasmid such as pSAC35 to allow the expression of the albumin fusion protein in yeast. All the above procedures can be performed using standard methods in molecular biology. The albumin fusion protein secreted from yeast can be collected and purified from the media and tested for its biological activity and its targeting activity using appropriate biochemical and biological tests.

### Example 75

### Preparation of HA-Enzymes Fusions

[1447] The cDNA for the enzyme of interest can be isolated by a variety of means including but not exclusively, from cDNA libraries, by RT-PCR and by PCR using a series of overlapping synthetic oligonucleotide primers, all using standard methods. The cDNA can be tailored at the 5′ and 3′ ends to generate restriction sites, such that oligonucleotide linkers can be used, for cloning of the cDNA into a vector containing the cDNA for HA. This can be at the N or C-terminus with or without the use of a spacer sequence. The enzyme cDNA is cloned into a vector such as pPPC0005 (FIG. 2), pScCHSA, pScNHSA, or pC4:HSA from which the complete expression cassette is then excised and inserted into the plasmid pSAC35 to allow the expression of the albumin fusion protein in yeast. The albumin fusion protein secreted from the yeast can then be collected and purified from the media and tested for its biological activity. For expression in mammalian cell lines a similar procedure is adopted except that the expression cassette used employs a mammalian promoter, leader sequence and terminator (See Example 1). This expression cassette is then excised and inserted into a plasmid suitable for the transfection of mammalian cell lines.

### Example 76

### Construct ID 2249, IFNa2-HSA, Generation

[1448] Construct ID 2249, pSAC35:IFNa2.HSA, comprises DNA encoding an IFNa2 albumin fusion protein which has the HSA chimeric leader sequence, followed by the mature form of IFNa2 protein, i.e., C1-E165, fused to the amino-terminus of the mature form of HSA in the yeast S. cerevisiae expression vector pSAC35.

[1449] Cloning of IFNa2 cDNA

[1450] The polynucleotide encoding IFNa2 was PCR amplified using primers IFNa2-1 and IFNa2-2, described below. The PCR amplimer was cut with Sal I/Cla I, and ligated into Xho I/Cla I cut pScCHSA. Construct ID #2249 encodes an albumin fusion protein containing the chimeric leader sequence of HSA, the mature form of IFNa2, followed by the mature HSA protein.

[1451] Two oligonucleotides suitable for PCR amplification of the polynucleotide encoding the mature form of IFNa2, IFNa2-1 and IFNa2-2, were synthesized:

IFNa2-1:

(SEQ ID NO:348)

5′-CGCGCGCGTCGACAAAAGATGTGATCTGCCTCAAACCCACA-3′
IFNa2-2:

(SEQ ID NO:349)

5′-GCGCGCATCGATGAGCAACCTCACTCTTGTGTGCATCTTCCTTACTT
CTTAAACTTTCT-3′

[1452] The IFNa2-1 primer incorporates a Sal I cloning site (shown underlined), nucleotides encoding the last three amino acid residues of the chimeric HSA leader sequence, as well as 22 nucleotides (shown in bold) encoding the first 7 amino acid residues of the mature form of IFNa2. In IFNa2-2, the Cla I site (shown underlined) and the DNA following it are the reverse complement of DNA encoding the first 10 amino acids of the mature HSA protein and the last 22 nucleotides (shown in bold) are the reverse complement of DNA encoding the last 7 amino acid residues of IFNa2 (see Example 2). A PCR amplimer of IFNa2-HSA was generated using these primers, purified, digested with Sal I and Cla I restriction enzymes, and cloned into the Xho I and Cla I sites of the pScCHSA vector. After the sequence was confirmed, the expression cassette encoding this IFNa2 albumin fusion protein was subcloned into Not I digested pSAC35.

[1453] Further, analysis of the N-terminus of the expressed albumin fusion protein by amino acid sequencing can confirm the presence of the expected IFNa2 sequence (see below).

[1454] Other IFNa2 albumin fusion proteins using different leader sequences have been constructed by methods known in the art (see Example 2). Examples of the various leader sequences include, but are not limited to, invertase “INV” (constructs 2343 and 2410) and mating alpha factor “MAF” (construct 2366). These IFNa2 albumin fusion proteins can be subcloned into mammalian expression vectors such as pC4 (constructs 2382) and pEE12.1 as described previously (see Example 5). IFNa2 albumin fusion proteins with the therapeutic portion fused C-terminus to HSA can also be constructed (construct 2381).

[1455] IFNa2 albumin fusion proteins of the invention preferably comprise the mature form of HSA, i.e., Asp-25 to Leu-609, fused to either the N- or C-terminus of the mature form of IFNa2, i.e., Cys-1 to Glu-165. In one embodiment of the invention, IFNa2 albumin fusion proteins of the invention further comprise a signal sequence which directs the nascent fusion polypeptide in the secretory pathways of the host used for expression. In a further preferred embodiment, the signal peptide encoded by the signal sequence is removed, and the mature IFNa2 albumin fusion protein is secreted directly into the culture medium. IFNa2 albumin fusion proteins of the invention may comprise heterologous signal sequences including, but not limited to, MAF, INV, Ig, Fibulin B, Clusterin, Insulin-Like Growth Factor Binding Protein 4, variant HSA leader sequences including, but not limited to, a chimeric HSA/MAF leader sequence, or other heterologous signal sequences known in the art. In a preferred embodiment, IFNa2 albumin fusion proteins of the invention comprise the native IFNa2. In further preferred embodiments, the IFNa2 albumin fusion proteins of the invention further comprise an N-terminal methionine residue. Polynucleotides encoding these polypeptides, including fragments and/or variants, are also encompassed by the invention.

[1456] Expression and Purification of Construct ID 2249.

[1457] Expression in Yeast S. Cerevisiae.

[1458] Transformation of construct 2249 into yeast S. cerevisiae strain BXP10 was carried out by methods known in the art (see Example 3). Cells can be collected at stationary phase after 72 hours of growth. Supernatants are collected by clarifying cells at 3000 g for 10 min. Expression levels are examined by immunoblot detection with anti-HSA serum (Kent Laboratories) or as the primary antibody. The IFNa2 albumin fusion protein of approximate molecular weight of 88.5 kDa can be obtained.

[1459] Purification from Yeast S. Cerevisiae Cell Supernatant.

[1460] The cell supernatant containing IFNa2 albumin fusion protein expressed from construct ID #2249 in yeast S. cerevisiae cells can be purified either small scale over a Dyax peptide affinity column (see Example 4) or large scale by following 5 steps: diafiltration, anion exchange chromatography using DEAE-Sepharose Fast Flow column, hydrophobic interaction chromatography (HIC) using Butyl 650S column, cation exchange chromatography using an SP-Sepharose Fast Flow column or a Blue-Sepharose chromatography, and high performance chromatography using Q-sepharose high performance column chromatography (see Example 4). The IFNa2 albumin fusion protein may elute from the DEAE-Sepharose Fast Flow column with 100-250 mM NaCl, from the SP-Sepharose Fast Flow column with 150-250 mM NaCl, and from the Q-Sepharose High Performance column at 5-7.5 mS/cm. N-terminal sequencing should yield the sequence CDLPQ (SEQ ID NO:98) which corresponds to the mature form of IFNa2.

[1461] The Activity of IFNa2 can be Assayed Using an In Vitro ISRE-SEAP Assay.

[1462] Method

[1463] The IFNa2 albumin fusion protein encoded by construct ID #2249 can be tested for activity in the ISRE-SEAP assay as previously described in Example 76. Briefly, conditioned yeast supernatants were tested at a 1:1000 dilution for their ability to direct ISRE signal transduction on the ISRE-SEAP/293F reporter cell-line. The ISRE-SEAP/293F reporter cells were plated at 3×10⁴ cell/well in 96-well, poly-D-lysine coated, plates, one day prior to treatment. The reporter cells were then incubated for 18 or 24 hours prior to removing 40 μL for use in the SEAP Reporter Gene Chemiluminescent Assay (Roche catalog #1779842). Recombinant human Interferon beta, “rhIFNb” (Biogen), was used as a positive control.

[1464] Result

[1465] The purified preparation of IFNa2-HSA demonstrated a relatively linear increase in the ISRE-SEAP assay over concentrations ranging from 10⁻¹ to 10¹ ng/mL (see FIG. 4) or 10⁻¹⁰ to 10⁻⁸ ng/mL (see FIG. 5).

[1466] In Vivo Induction of OAS by Interferon Alpha Fusion Encoded by Construct Id 2249.

[1467] Method

[1468] The OAS enzyme, 2′-5′-OligoAdenylate Synthetase, is activated at the transcriptional level by interferon in response to antiviral infection. The effect of interferon constructs can be measured by obtaining blood samples from treated monkeys and analyzing these samples for transcriptional activation of two OAS mRNA, p41 and p69. A volume of 0.5 mL of whole blood was obtained from 4 animals per group at 7 different time points, day 0, day 1, day 2, day 4, day 8, day 10, and day 14 per animal. The various groups include vehicle control, intravenous injection of 30 μg/kg HSA-IFN on day 1, subcutaneous injection of 30 μg/kg of HSA-IFN on day 1, subcutaneous injection of 300 μg/kg of HSA-IFN on day 1, and subcutaneous injection of 40 μg/kg of Interferon alpha (Schering-Plough) as a positive control on days 1, 3, and 5. The levels of the p41 and the p69 mRNA transcripts were determined by real-time quantitative PCR (Taqman) using probes specific for p41-OAS and p69-OAS. OAS mRNA levels were quantitated relative to 18S ribosomal RNA endogenous control. The albumin fusion encoded by construct 2249 can be subjected to similar experimentation.

[1469] Results

[1470] A significant increase in mRNA transcript levels for both p41 and p69 OAS was observed in HSA-interferon treated monkeys in contrast to IFNa treated monkeys (see FIG. 6 for p41 data). The effect lasted nearly 10 days.

### Example 77

### Indications for IFNa2 Albumin Fusion Proteins

[1471] IFN alpha albumin fusion protein (including, but not limited to, those encoded by constructs 2249, 2343, 2410, 2366, 2382, and 2381) can be used to treat, prevent, ameliorate, and/or detect multiple sclerosis. Other indications include, but are not limited to viral infections including Severe Acute Respiratory Syndrome (SARS) and other coronavirus infections; filoviruses, including but not limited to Ebola viruses and Marburg virus; Arenaviruses, including but not limited to Pichende virus, Lassa virus, Junin virus, Machupo virus, Guanarito virus; and lymphocytic choriomeningitis virus (LCMV); Bunyaviruses, including but not limited to Punta toro virus, Crimean-Congo hemorrhagic fever virus, sandfly fever viruses, Rift Valley fever virus, La Crosse virus, and hantaviruses; Flaviviruses, including but not limited to Yellow Fever, Banzi virus, West Nile virus, Dengue viruses, Japanese Encephalitis virus, Tick-borne encephalitis, Omsk Hemorrhagic Fever, and Kyasanur Forest Disease virus; Togaviruses, including but not limited to Venezuelan, eastern, and western equine encephalitis viruses, Ross River virus, and Rubella virus; Orthopox viruses, including but not limited to Vaccinia, Cowpox, Smallpox, and Monkeypox; Herpesviruses; FluA/B; Respiratory Sincytial virus (RSV); paraflu; measles; rhinoviruses; adenoviruses; Semliki Forest virus; Viral Hemorrhagic fevers; Rhabdoviruses; Paramyxoviruses, including but not limited to Nipah virus and Hendra virus; and other viral agents identified by the U.S. Centers for Disease Control and Prevention as high-priority disease agents (i.e., Category A, B, and C agents; see, e.g., Moran, Emerg. Med. Clin. North. Am. 2002; 20(2):311-30 and Darling et al., Emerg. Med. Clin. North Am. 2002; 20(2):273-309).

[1472] Preferably, the IFNα-albumin fusion protein or IFN hybrid fusion protein is administered in combination with a CCR5 antagonist, further in association with at least one of ribavirin, IL-2, IL-12, pentafuside alone or in combination with an anti-HIV drug therapy, e.g., HAART, for preparation of a medicament for the treatment of HIV-1 infections, HCV, or HIV-1 and HCV co-infections in treatment-naïve as well as treatment-experienced adult and pediatric patients.

### Example 78

### Construct ID #3691, BNP-HSA, Generation

[1473] Construct ID #3691, pC4:SPCON.BNP1-32/HSA, comprises DNA encoding a BNP albumin fusion protein which has a consensus leader sequence, secrecon, followed by the processed, active BNP peptide (amino acids 1-32) fused to the amino-terminus of the mature form of HSA in the mammalian expression vector pC4.

[1474] Cloning of BNP cDNA for Construct 3691

[1475] The polynucleotide encoding BNP was PCR amplified using primers BNP-1 and BNP-2, described below, cut with Bam HI/Cla I, and ligated into Bam HI/Cla I cut pC4:HSA resulting in construct ID #3691. Construct ID #3691 encodes an albumin fusion protein containing a consensus leader sequence (SEQ ID No:111) and the processed, active form of BNP, followed by the mature HSA protein (see SEQ ID NO:204 for construct 3691 in Table 2).

[1476] Two oligonucleotides suitable for PCR amplification of the polynucleotide encoding the active, processed form of BNP, BNP-1 and BNP-2, were synthesized:

BNP-1:

(SEQ ID NO:364)

5′-GAGCGCGGATCCAAGCTTCCGCCATCATGTGGTGGCGCCTGTGGTGG
CTGCTGCTGCTGCTGCTGCTGCTGTGGCCCATGGTGTGGGCCAGCCCCAA
GCTGGTGCAAGG-3′
BNP-2:

(SEQ ID NO:365)

5′-AGTCCCATCGATGAGCAACCTCACTCTTGTGTGCATCATGCCGCCTC
AGCACTTTGC-3′.

[1477] BNP-1 incorporates a Bam HI cloning site (underlined), polynucleotides encoding a consensus leader sequence (SEQ ID NO:111) (italicized), and polynucleotides encoding the first seven amino acid sequence of BNP (bolded). In BNP-2, the underlined sequence is a Cla I site, and the polynucleotides that follow it contains the reverse complement of DNA encoding the last 6 amino acids of BNP (bolded) and the first 10 amino acids of the mature HSA protein. Using these two primers the BNP protein was PCR amplified. Annealing and extension temperatures and times must be empirically determined for each specific primer pair and template.

[1478] The PCR product was purified (for example, using Wizard PCR Preps DNA Purification System (Promega Corp)) and then digested with Bam HI and Cla I. After further purification of the Bam HI-Cla I fragment by gel electrophoresis, the product was cloned into Bam HI/Cla I digested pC4:HSA to produce construct ID #3691. The expression construct was sequence verified.

[1479] Expression and Purification of Construct ID 3691.

[1480] Expression in 293F Cells.

[1481] Construct ID #3691, pC4:SPCON.BNP1-32/HSA, was transfected into 293F cells by methods known in the art (see Example 6).

[1482] Purification from 293F Cell Supernatant.

[1483] Two liters of supernatant were collected 3 days post-transfection. The recombinant protein was captured by 5 ml Blue Sepharose CL-6B column (Amersham Biosciences, Piscataway, N.J., USA) and eluted by 2 M NaCl. The material was bound to HiPrep 16/10 Phenyl FF (high sub) column and eluted by 20 mM MES, pH 6.7. BNP-HSA was further purified by hydroxyapatite column chromatography in sodium phosphate buffer gradient (0-20 mS/cm in 200 ml) at pH 6.8. The final product was exchanged into PBS pH 7.2 by a HiPrep 26/10 desalting column (Amersham Biosciences).

[1484] The Activity of BNP-HSA can be Assayed Using an In Vitro NPR-A/cGMP Assay.

[1485] Natriuretic peptide receptor-A (NPR-A) is the signaling receptor for BNP, and as such, is responsible for most of BNP's biological effects. BNP bioactivity is mediated by NPR-A guanylyl cyclase domain that converts GTP to cGMP upon activation. A convenient assay for BNP activity is to measure the BNP stimulation of a 293F cell line that stably over-expresses NPR-A. The cGMP production in the cells after exposure to BNP can be measured by cGMP ELISA.

[1486] Method of Screening NPR-A 293F Stable Clones.

[1487] The open reading frame of human NPR-A was constructed into pcDNA3.1 expression vector (Invitrogen). 293F cells were stably transfected with the plasmid DNA by Lipofectamine method and selected by 0.8 μg/ml G418. 293F/NPR-A stable clones were screened for best response to recombinant BNP.

[1488] Measurement of cGMP Activation.

[1489] cGMP activation by BNP was carried out in 293F/NPR-A cells and measured by CatchPoint cyclic-GMP fluorescent assay kit (Molecular Devices, Sunnyvale, Calif., USA). Briefly, 50,000 cells/well of 293F/NPR-A cells cultured in a 96-well plate were washed into 80 μl prestimulation buffer (Krebs-Ringer Bicarbonate Buffer with 10 mM glucose, pH 7.4, 15 nM sodium bicarbonate, and 0.75 mM 3-isobutyl-1-methylxanthine). BNP-HSA or recombinant BNP in 40 μl prestimulation buffer was added to the cells at 37° C. for 10 min. The cells were lysed with 40 μl Lysis Buffer for 10 min with shaking. The amounts of cGMP in the lysates were quantitated as per the manufacturer's instruction.

[1490] Result

[1491] The dose-response relationship of BNP-HSA and recombinant BNP were determined (see FIG. 7). The maximal activities of Construct ID #3691 and recombinant BNP were similar (1.63±0.016 vs. 1.80±0.016 pm, respectively), with EC50 values of 28.4±1.2, and 0.46±1.1 nM, respectively.

[1492] BNP-HSA Decreases Blood Pressure In Vivo.

[1493] Method

[1494] BNP reduces blood pressure by direct vasodilation as well as by suppression of renin/angiotensin/endothelin/aldosterone systems. The ability of BNP-HSA to decrease arterial blood pressure was tested in three-month old male spontaneously hypertensive rats purchased from Taconic (Germantown, N.Y., USA). Spontaneously hypertensive rats are genetically hypertensive with onset of high blood pressure after three months of age. BNP-HSA or recombinant BNP was reconstituted in 0.3 cc PBS per rat. The drugs were delivered via tail vein injection. Systolic and diastolic blood pressures were recorded by cuff-tail method using XBP-1000 System (Kent Scientific, Torrington, Conn., USA). For each blood pressure data point, 4-5 consecutive readings were taken and averaged. Mean arterial pressure (MAP) was calculated as ⅓ systolic pressure+⅔ diastolic pressure. For dose-response determination, blood pressures were measured 20 h after pC4:SPCON.BNP1-32/HSA administration at doses of 0.5, 2, 6, and 18 nmol/kg.

[1495] Result

[1496] The typical systolic pressure of spontaneously hypertensive rats was 180-200 mmHg before dosing. A single bolus of 6 nmol/kg BNP-HSA delivered via tail vein intravenous injection lowered both systolic and diastolic pressure, which accounted for more than 30 mmHg mean arterial pressure (MAP) reduction. The lowered blood pressure was steady and continued for a day and then gradually returned to the baseline over several days (see FIG. 8). In contrast, due to its instantaneous clearance, a single 6 nmol/kg bolus of recombinant BNP, produced only a very transient MAP decrease of about ˜15 mmHg.

[1497] In addition, the dose-response 20 hours post injection of a bolus of BNP-HSA was determined in four spontaneously hypertensive rats. 0.5 nmol/kg BNP-HSA had an average of 7 mmHg MAP reduction, while 6 nmol/kg BNP-HSA had an average of 30 mmHg MAP reduction, and a high dose of 18 nmol/kg BNP-HSA only lowered the blood pressure slightly more than 6 nmol/kg.

[1498] In Vivo Induction of Plasma cGMP by BNP-HSA.

[1499] Method

[1500] The intracellular cGMP activation by BNP results in its release from the cell to circulation. The plasma cGMP level correlates with BNP-induced cardiovascular and renal physiology. Plasma cGMP has been used as a biomarker for in vivo BNP action. To test the induction of plasma cGMP by BNP-HSA in vivo, eleven- to 12-week-old male C57/BL6 mice received a single bolus of recombinant BNP or BNP-HSA at a 6 nmol/kg dose via tail vein. Plasma was prepared from the tail bleeds at 5, 10, 20, 40, and 80 min time points for the recombinant BNP dosing group and at additional 640, 1440, 2880, and 5760 min for the BNP-HSA group. Plasma samples from mice treated with PBS as the vehicle control were collected as the zero time points. cGMP levels were determined by CatchPoint cyclic-GMP fluorescent assay kit according to the manufacture's instruction.

[1501] Result

[1502] Following a single intravenous bolus of 6 nmol/kg recombinant BNP or BNP-HSA, peak plasma cGMP levels over the baseline were increased 3.9- or 5.6-fold, respectively (see FIG. 9). In addition, the one-phase exponential decay half-life of cGMP following recombinant BNP treatment was 16 min (10 to 42 min, 95% CI), while the one-phase exponential decay half-life of cGMP following BNP-HSA administration was 1538 min (1017 to 3153 min, 95% CI).

[1503] In Vivo Pharmacokinetic Analysis of BNP Albumin Fusion Encoded by Construct ID 3691.

[1504] Method

[1505] Eleven- to 12-week-old male C57/BL6 mice (obtained from Ace Animals, Boyertown, Pa., USA) weighed 25.1±0.12 g at the time of the study. All animals were dosed at a volume of 10 ml/kg body weight. Predose animals were injected with PBS. Recombinant BNP was injected intravenously in the tail or subcutaneously in the mid-scapular region.

[1506] Pharmacokinetic analysis was performed on the following groups:

TABLE 8

| | | Dose | | N/ | |
|---|---|---|---|---|---|
| Group | Drug | (mg/kg) | Route | time | Time (hours) |
| 1 | BNP-HSA | 2.19 | Subcutaneous | 3 | 0.5, 2, 6, 16, 24, |
| | | | | | 32, 48, 72, 96 |
| 2 | BNP-HSA | 2.19 | Intravenous | 3 | 0.083, 2, 6, 16, |
| | | | | | 24, 32, 48, 72, 96 |
| 3 | Vehicle | 0 | Subcutaneous | 3 | predose |
| 4 | Vehicle | 0 | Intravenous | 3 | predose |

[1507] Blood was sampled from the inferior vena cava, placed into an EDTA-coated microtainer, and stored on ice. The samples were centrifuged in a microcentrifuge at 14,000 rpm (16,000×g) for 10 minutes at room temperature. The plasma was transferred into cluster tubes and stored at −80° C.

[1508] BNP-HSA concentrations in plasma samples were determined using BNP EIA Kit (Phoenix Pharmaceutical, Belmont, Calif., USA). The standard curves were generated at the same time on the same plate with testing samples. The detection limit was 0.11 ng/mL for recombinant BNP. The assay detects recombinant BNP and does not cross react to mouse BNP.

[1509] Analysis was conducted by noncompartmental methods (WinNonlin; version 4.1; Pharsight Corp., Mountain View, Calif., USA). The mean plasma concentration at each time was used in the analysis. A linear up/log down trapezoidal method was used to calculate the AUC0-ₜ. Extrapolation to infinity AUC_{0-∞} was done by dividing the last observed concentration by the terminal elimination rate constant. Data were uniformly weighted for these analyses.

[1510] Result

[1511] The mean baseline concentration of BNP-HSA in plasma as detected in the pre-dose samples was approximately 0.081-0.095 μg/ml. Following a single intravenous or subcutaneous injection, BNP-HSA had terminal elimination half-lives of 11.2 (intravenous delivery) or 19.3 h (subcutaneous delivery), while the half-life of recombinant BNP in mice was 3.1 min. Non compartmental analysis of BNP-HSA revealed that BNP-HSA had the following characteristics:

TABLE 9

| | Unit | Intravenous | Subcutaneous |
|---|---|---|---|
| tₘₐₓ | h | NA | 16 |
| Cₘₐₓ | μg/ml | NA | 11.2 |
| t_{1/2,term} | h | 11.2 | 19.3 |
| AUC_{0-∞} | (h · μg/ml)/(mg/kg) | 658.9 | 227.9 |
| Vₛₛ | ml/kg | 37 | NA |
| V_{z} or V_{z}/F | ml/kg | 53.5 | 268 |
| CL or CL/F | ml/h/kg | 3.3 | 9.6 |
| MRT | h | 11.2 | 19.8 |
| Bioavailability | % | | 34.6 |

Cₘₐₓ, peak plasma concentration of the drug;
tₘₐₓ, time of maximum plasma concentration;
AUC_{0-∞}, area under the plasma drug concentration-time curve from time 0 to infinite time;
t_{1/2,term}, terminal elimination phase half-life;
CL, clearance after intravenous dosing;
CL/F, apparent clearance after subcutaneous dosing;
Vₛₛ, volume of distribution at steady-state after intravenous dosing;
V_{z}: volume of distribution during the terminal phase after intravenous dosing;
V_{z}/F, volume of distribution during the terminal phase after subcutaneous dosing;
NA, not applicable.

[1512] Five points at the terminal phase of the intravenous profile and four points at the terminal phase of the subcutaneous profile were selected for the terminal half-life calculation. The resulting AUC during this terminal phase was approximately 10% of the total AUC for the intravenous and subcutaneous profiles, respectively. This is compared to only 2% and 4% of the total AUC for the intravenous and subcutaneous profile, respectively, when the last three points were selected for the terminal half-life calculation.

### Example 79

### Construct ID #3618, BNP (2×)-HSA, Generation

[1513] Construct ID #3618, pC4:SPCON.BNP1-32(2×)/HSA, comprises DNA encoding a BNP albumin fusion protein which has a consensus leader sequence, secreton, followed by two processed, active BNP peptides (amino acids 1-32) in tandem fused to the amino-terminus of the mature form of HSA in the mammalian expression vector pC4.

[1514] Cloning of BNP cDNA for Construct 3618

[1515] The polynucleotide encoding the duplicate BNP moiety was first PCR amplified from the processed active form of BNP (amino acids 1-32) using four primers BNP-1, BNP-2, BNP-3, and BNP-4, described below, to create two fragments A and B. Following amplification, two purified fragments (A and B) were mixed in an equal molar amount and used as a PCR template and amplified with primers BNP-5 and BNP-6, as described below. The BNP (2×) insert was then digested with BamHI and ClaI and ligated into pC4HSA vector pre-digested with BamHI and ClaI resulting in construct 3618. Construct ID #3618 encodes an albumin fusion protein containing a consensus leader sequence, secrecon (SEQ ID NO:111), and two, tandem copies of the processed, active form of BNP, followed by the mature HSA protein (see SEQ ID NO:226 for construct 3618 in Table 2).

[1516] Four oligonucleotides suitable for PCR amplification of the polynucleotides encoding two fragments of BNP protein were first synthesized:

BNP-1

(SEQ ID NO:460)

5′-AGCCCCAAGATGGTGCAAGGGTCTGGCTGCTTTGGGAGGAAGATGGA
CCGGATCAGCTCCTCCAGTGGCTGGGCTGCAAAGTGCTGAGGCGGCA
T-3′
BNP-2

(SEQ ID NO:461)

5′-CCTTGCACCATCTTGGGGCTATGCCGCCTCAGCACTTTGC-3′
BNP-3

(SEQ ID NO:462)

5′-GCAAAGTGCTGAGGCGGCATAGCCCCAAGATGGTGCAAGG-3′
BNP-4

(SEQ ID NO:463)

5′-AGTCCCATCGATGAGCAACCTCACTCTTGTGTGCATCATGCCGCCTC
AGCACTTTGC-3′

[1517] Using primer sets BNP-1/BNP-2 and BNP-3/BNP-4, two BNP proteins fragments (A and B, respectively) were PCR amplified. Annealing and extension temperatures and times must be empirically determined for each specific primer pair and template. Fragments A and B were purified (for example, using Wizard PCR Preps DNA Purification System (Promega Corp)), mixed at equal molar amounts, and used as a template for PCR amplification using two additional oligonucleotides suitable for PCR amplification, BNP-5 and BNP-6:

BNP-5:

(SEQ ID NO:382)

5′-GAGCGCGGATCCAAGCTTCCGCCATCATGTGGTGGCGCCTGTGGTGG
CTGCTGCTGCTCTGCTGCTGCTGTGGCCCATGGTGTGGGCCAGCCCCAAG
CTGGTGCAAGG-3′
BNP-6:

(SEQ ID NO:383)

5′-AGTCCCATCGATGAGCAACCTCACTCTTGTGTGCATCATGCCGCCTC
AGCACTTTGC-3′

[1518] BNP-5 incorporates a Bam HI cloning site (underlined), polynucleotides encoding a consensus leader sequence (SEQ ID No:111) (italicized), and polynucleotides encoding the first seven amino acid sequence of BNP (bolded). In BNP-6, the underlined sequence is a Cla I site, and the polynucleotides that follow it contains the reverse complement of DNA encoding the last 6 amino acids of BNP (bolded) and the first 10 amino acids of the mature HSA protein. Using these two primers, a consensus leader sequence and two tandem copies of active BNP peptides were PCR amplified. Annealing and extension temperatures and times must be empirically determined for each specific primer pair and template.

[1519] The PCR product was purified (for example, using Wizard PCR Preps DNA Purification System (Promega Corp)) and then digested with Bam HI and Cla I. After further purification of the Bam HI-Cla I fragment by gel electrophoresis, the product was cloned into Bam HI/Cla I digested pC4:HSA to produce construct ID #3618. The expression construct was sequence verified.

[1520] Expression and Purification of Construct ID #3618.

[1521] Expression in 293F Cells.

[1522] Construct ID #3618, pC4:SPCON.BNP1-32(2×)/HSA, was transfected into 293F cells by methods known in the art (see Example 6).

[1523] Purification from 293F Cell Supernatant.

[1524] pC4:SPCON.BNP1-32(2×)/HSA encoded by Construct ID #3618 was purified as previously described above in Example 78 under subsection heading “Purification from 203F cell supernatant.”

[1525] The Activity of BNP (2×)-HSA can be Assayed Using an In Vitro NPR-A/cGMP Assay.

[1526] The activity of BNP (2×)-HSA encoded by Construct ID #3618 can be assayed in vitro using an NPR-A/cGMP assay as previously described in Example 78 under subsection heading, “The activity of BNP-HSA can be assayed using an in vitro NPR-A/cGMP Assay,” and “Method of Screening NPR-A 203F Stable Clones.”

[1527] Result

[1528] The dose-response relationship of BNP (2×)-HSA and recombinant BNP were determined (see FIG. 7). The maximal activities of BNP (2×)-HSA encoded by Construct ID #3618, and recombinant BNP were similar (1.68±0.021, vs. 1.80±0.016 pm, respectively), with EC50 values of 9.8±1.1, and 0.46±1.1 nM respectively.

### Example 80

### In Vitro NPR-A/cGMP Assay for BNP

[1529] Background and Methods:

[1530] Natriuretic peptide receptor-A (NPR-A) is the signaling receptor for BNP, and as such, is responsible for most of BNP's biological effects. BNP bioactivity is mediated by NPR-A guanylyl cyclase domain that converts GTP to cGMP upon activation. A convenient assay for BNP activity is to measure the BNP stimulation of a 293F cell line that stably over-expresses NPR-A. The cGMP production in the cells after exposure to BNP can be measured by cGMP ELISA.

[1531] Method of Screening NPR-A 293F Stable Clones.

[1532] The open reading frame of human NPR-A was constructed into pcDNA3.1 expression vector (Invitrogen). 293F cells were stably transfected with the plasmid DNA by Lipofectamine method and selected by 0.8 μg/ml G418. 293F/NPR-A stable clones were screened for best response to recombinant BNP.

[1533] Measurement of cGMP Activation.

[1534] cGMP activation by BNP was carried out in 293F/NPR-A cells and measured by CatchPoint cyclic-GMP fluorescent assay kit (Molecular Devices, Sunnyvale, Calif., USA). Briefly, 50,000 cells/well of 293F/NPR-A cells cultured in a 96-well plate were washed into 80 μl prestimulation buffer (Krebs-Ringer Bicarbonate Buffer with 10 mM glucose, pH 7.4, 15 nM sodium bicarbonate, and 0.75 mM 3-isobutyl-1-methylxanthine). BNP-HSA or recombinant BNP in 40 μl prestimulation buffer was added to the cells at 37° C. for 10 min. The cells were lysed with 40 μl Lysis Buffer for 10 min with shaking. The amounts of cGMP in the lysates were quantitated as per the manufacturer's instruction and EC50 values were determined. In this assay, higher cGMP levels result in lower signals (relative fluorescent units or RFUs).

[1535] Generation of Construct ID #3796

[1536] Construct ID #3796, pSAC35:HSA.BNP (1-32), comprises DNA encoding a BNP albumin fusion protein which has a HSAsp/KEX2 leader sequence, followed by the processed, mature form of HSA, fused to the N-terminus of the processed, mature form of BNP peptide (amino acids 1-32) in the yeast expression vector pSAC35 (see SEQ ID NO:214 for construct 3796 in Table 2).

[1537] Cloning of BNP cDNA for Construct 3796

[1538] The polynucleotide encoding BNP was PCR amplified using primers BNP-102689 and BNP-102692, described below, cut with Bsu36I/AscI, and ligated into Bsu36I/AscI, cut pSAC-NEC resulting in construct ID #3796. The template for PCR amplification was polynucleotides encoding the entire mature BNP (1-32 sequence).

[1539] Two oligonucleotides suitable for PCR amplification of the polynucleotide encoding the active, processed form of BNP, BNP-102689 and BNP-102692 were synthesized:

BNP-102689:

(SEQ ID NO:378)

5′-AAGCTGCCTTAGGCTTAAGCCCCAAGATGGTGCAAGGGTC-3′
BNP-102692:

(SEQ ID NO:379)

5′-GCACCGGGCGCGCCTTAATGCCGCCTCAGCACTTTGCAGC-3′

[1540] BNP-102689 incorporates a Bsu36I cloning site (underlined), polynucleotides encoding the last five amino acids of HSA (italicized), and polynucleotides encoding the first eight amino acid sequence of BNP (bolded). In BNP-102692, the underlined sequence is a Asc I site, and the polynucleotides that follow it contains the reverse complement of DNA encoding the last 8 amino acids of BNP (bolded) and a termination codon (italicized). Using these two primers the HSA/BNP fusion region was PCR amplified. Annealing and extension temperatures and times must be empirically determined for each specific primer pair and template.

[1541] The PCR product was purified (for example, using Wizard PCR Preps DNA Purification System (Promega Corp)) and then digested with Bsu36I and Asc I. After further purification of the Bsu36I/Asc I fragment by gel electrophoresis, the product was cloned into Bsu36I/Asc I digested pSAC35-NEC to produce construct ID #3796. The expression construct was sequence verified.

[1542] Expression and Purification of Construct ID 3796.

[1543] Expression in S. Cerevisiae.

[1544] Construct ID #3796, pSAC35:HSA.BNP (1-32), was transfected into BXP10 cells by methods known in the art (see Example 4).

[1545] Purification from BXP10 Cell Supernatant.

[1546] After approximately 84 hours, the culture was harvested and clarified of cells through centrifugation and 0.2 μm filtration. The recombinant protein was captured by 5 ml Blue Sepharose fast flow column (GE Healthcare) and eluted by a combination of sodium chloride and sodium octanoate. Some preparation were completed by binding the protein to a ceramic hydroxyl appetite column (BioRad) and eluting with an increased concentration of phosphate. Other preparations were bound to a DEAE Sepharose fast flow column (GE Healthcare) and eluted by a linear sodium chloride gradient. The elution pool was then bound to a Q sepharose high performance column (GE Healthcare) and eluted with a sodium chloride gradient. The final product was concentrated and exchanged in formulation buffer by tangential flow filtration.

[1547] Generation and Cloning of Construct ID #3959

[1548] Construct ID #3959, pSAC35:HSA.BNP (1-29), comprises DNA encoding a BNP albumin fusion protein which has a HSAsp/KEX2 leader sequence, followed by the processed, mature form of HSA, fused to the N-terminus of the procecessed, mature form of BNP peptide lacking the last three amino acids (S1-L29) in the yeast expression vector pSAC35 (see SEQ ID NO:501 for construct 3959 in Table 2).

[1549] The polynucleotide encoding BNP was PCR amplified using primers BNP-103801 and BNP-104315, described below, cut with Bsu36I/AscI, and ligated into Bsu36I/AscI, cut pSAC-NEC resulting in construct ID #3959. The template for PCR amplification was primer construct ID 3796 (see below).

[1550] Two oligonucleotides suitable for PCR amplification of the polynucleotide encoding the active, processed form of BNP, BNP-103801 and BNP-104315 were synthesized:

BNP-103801:

(SEQ ID NO:578)

5′-CAGGAGCCCCTTAGGCTTAAGCCCCAAGATGGTGCAAGGGTCT-3′
BNP-104315:

(SEQ ID NO:579)

5′-CCTCACTCGGCGCGCCTTACAGCACTTTGCAGCCCAGGCCACTGG
A-3′

[1551] BNP-103801 incorporates a Bsu36I cloning site (underlined), polynucleotides encoding the last five amino acids of HSA (italicized), and polynucleotides encoding the first eight amino acid sequence of BNP (bolded). In BNP-104315, the underlined sequence is a Asc I site, and the polynucleotides that follow it contains the reverse complement of DNA encoding the S21 through L29 amino acids of BNP (bolded) and a termination codon (italicized). Using these two primers the HSA/BNP fusion region was PCR amplified. Annealing and extension temperatures and times must be empirically determined for each specific primer pair and template.

[1552] The PCR product was purified (for example, using Wizard PCR Preps DNA Purification System (Promega Corp)) and then digested with Bsu361 and Asc I. After further purification of the Bsu36I/Asc I fragment by gel electrophoresis, the product was cloned into Bsu36I/Asc I digested pSAC35-NEC to produce construct ID #3959. The expression construct was sequence verified.

[1553] Expression and Purification of Construct ID 3959.

[1554] Expression in S. Cerevisiae.

[1555] Construct ID #3959, pSAC35:HSA.BNP (S1-L29), was transfected into BXP10 cells by methods known in the art (see Example 4).

[1556] Purification from BXP10 Cell Supernatant.

[1557] After approximately 84 hours, the culture was harvested and clarified of cells through centrifugation and 0.2 μm filtration. The recombinant protein was captured by 5 ml Blue Sepharose fast flow column (GE Healthcare) and eluted by a combination of sodium chloride and sodium octanoate. Some preparation were completed by binding the protein to a ceramic hydroxyl appetite column (BioRad) and eluting with an increased concentration of phosphate. Other preparations were bound to a DEAE Sepharose fast flow column (GE Healthcare) and eluted by a linear sodium chloride gradient. The elution pool was then bound to a Q sepharose high performance column (GE Healthcare) and eluted with a sodium chloride gradient. The final product was concentrated and exchanged in formulation buffer by tangential flow filtration.

[1558] Result

[1559] The dose-response relationship of HSA-BNP (1-29) and HSA-BNP (1-32) and recombinant BNP were determined (see FIG. 10). The EC50 value of HSA-BNP (1-29) and HSA-BNP (1-32) were several fold greater than the EC50 value of recombinant BNP (467.9, 45.06, and 0.2227, respectively). In addition, the HSA-BNP (1-29) fusion protein had a 10 fold greater EC50 value than HSA-BNP (1-32) fusion protein.

### Example 81

### In vitro Assay for Degradation of ANP and BNP

[1560] Background and Methods:

[1561] Neprilysin, also known as MME, CALLA, CD10, Common acute lymphocytic leukemia antigen, Enkephalinase, EPN, NEP, Neutral endopeptidase, or Neutral endopeptidase 24.11, is a 743 amino acid (MW 90,000-110,000 kD) cell-surface metallopeptidase expressed by numerous tissues, including, but not limited to, prostate, kidney, intestine, endometrium, adrenal glands, and lung. Neprilysin inactivates a variety of physiologically active peptides, including, but not limited to, ANP, BNP, CNP, substance P, bradykinin, oxytocin, Leu- and Met-enkephalins, neurotensin, bombesin, endothelin-1, and bombesin-like peptides, by cleaving the amino side of hydrophobic residues.

[1562] The relative susceptibility to neprilysin hydrolysis has been determined to be approximately 4-5 minutes for CNP, 8 minutes for ANP, and 2 hours for BNP. (Kenny, A. J. et al., Biochem J. 291(1): 83-8 (1993)).

[1563] The Effect of Neprilysin on ANP and BNP Peptides

[1564] ANP and BNP peptides were assayed for activity in the CatchPoint cGMP assay (Molecular Devises) with or without exposure to the protease neprilysin. Particularly, 5 μM of ANP or BNP was incubated for 24 hours at 37° C. in MES buffer (0.1M 2-(N-morpholino)ethanesulfonic acid (Sigma)) with or without 10 nM neprilysin (R&D Systems). 293F cells, which have been stably transfected with NPR-A as described in Example 80, were then stimulated with various concentrations of protease-treated ANP or BNP. Cell lysates were then analyzed for cGMP activation using the CatchPoint cGMP assay (Molecular Devices) as described in Example 80.

[1565] Results

[1566] Dose-response curves were calculated for BNP and ANP with or without incubation with neprilysin. (See, FIG. 11A). BNP with or without incubation with neprilysin exhibited similar BNP activity with EC50 values of 0.2966 and 0.2702, respectively. However, incubation of ANP with neprilysin resulted in a significant reduction in ANP activity compared to untreated ANP with EC50 values of 0.2965 and 60.47, respectively. Select samples were further analyzed by reverse-phase HPLC, using techniques known in the art. Percent comparisons are to samples incubated for the same period of time in the absence of neprilysin. (See, FIG. 11D) Although ANP proteolysis occurs within 20 minutes of treatment with neprilysin, significant BNP proteolysis is not observed even after 24 hours of incubation with neprilysin.

[1567] The Effect of Neprilysin on ANP-HSA Fusion Proteins

[1568] ANP and ANP-HSA (CID 3484) were incubated in MES buffer (0.1M 2-(N-morpholino)ethanesulfonic acid (Sigma)) with or without 10 nM neprilysin (R&D Systems) for 20 minutes, 1 hour, or 24 hours at 37° C. 293F cells, which have been stably transfected with NPR-A as described in Example 80, were then stimulated with various concentrations of protease-treated ANP or ANP-HSA. Cell lysates were then analyzed for cGMP activation using the CatchPoint cGMP assay (Molecular Devices) as described in Example 80.

[1569] Results

[1570] Dose-response curves were calculated for ANP and ANP-HSA with or without incubation with neprilysin. (See, FIGS. 11B and 11C, respectively). ANP peptide demonstrated a significant reduction in activity within 1 hour of treatment with neprilysin. However, ANP-HSA (CID 3484) demonstrated no significant reduction in activity even after 24 hours of treatment with neprilysin. Select samples were further analyzed by reverse-phase HPLC, using techniques known in the art. Percent comparisons are to samples incubated for the same period of time in the absence of neprilysin. (See, FIG. 11D). Although ANP proteolysis occurs within 20 minutes of treatment with neprilysin, no proteolysis of ANP-HSA (CID 3484) was observed even after 24 hours of incubation with neprilysin.

### Example 82

### Anti-Viral Activity of HSA-IFNα2b, in Combination with Ribavirin in Genotype 1. Interferon-Naïve Chronic Hepatitis C(HCV) Patients

[1571] Background:

[1572] Conventional treatment for Genotype 1, interferon-naïve (IFN-naïve) HCV patients utilizes interferon a in combination with ribavirin (RBV) for 48 weeks. However, this treatment has significant practical limitations. Due to the well-known side effects of current interferon therapy, patients' quality of life is substantially decreased after each administration of interferon. Current protocols require dosing at least weekly, resulting in a prolonged period of decreased quality of life. Large numbers of patients discontinue treatment as a result, with some studies reporting discontinuation rates over 50%. Moreover, current interferon therapy also has a considerable rate of significant hematological reductions, which can require a reduction in RBV dose, or more significantly, in a temporary termination of the interferon treatment regimen until the hematological values normalize. Thus, there is a clear need for improved therapeutic protocols for the treatment of genotype 1 HCV in IFN-naïve patients.

[1573] Rationale:

[1574] HSA-IFNα2b was generated by genetically fusing mature albumin at its C-terminus to the N-terminus of mature interferon α-2b. The safety and efficacy of treatment with HSA-IFNα2b in combination with RBV was evaluated in an active controlled clinical study in genotype 1, IFN-naïve HCV human patients, and compared to conventional treatment with PEG-IFNα-2a (PEG-IFN) in combination with RBV as an active control.

[1575] Methods:

[1576] Human HCV patients who were genotype 1, IFN-naïve were treated with either HSA-IFNα2b or active control, PEG-IFN, in combination with ribavirin (RBV). More particularly, 458 human subjects were randomized into 4 subcutaneous (sc) treatment groups: (a) PEG-IFN dosed at 180 μg once weekly (Q1w); (b) HSA-IFNα2B dosed at 900 μg once every 2 weeks (Q2w); (c) HSA-IFNα2b dosed at 1200 μg Q2w; or (d) HSA-IFNα2b dosed at 1200 μg once every 4 weeks (Q4w)).

[1577] Each subject in each treatment group also received 1000-1200 mg/day RBV based on body weight. The basis for stratification included body mass index (BMI) (<25 kg/m² or ≧25 kg/m²) and HCV RNA titer (<800,000 IU/ml or ≧800,000 IU/ml).

[1578] Treatment duration of the study is 48 weeks with a 24 week follow-up. The primary efficacy endpoint of the study is sustained virologic response (SVR).

[1579] HCV RNA titer was measured using a real-time PCR assay, Quantasure™ (Labcorp) with a sensitivity range (level of quantification (LOQ)) of 43 IU to 69 million IU/mL and a level of detection (LOD) of 10 IU/mL. Alanine Transferase (ALT) and hematologic effects, including absolute neutrophil count (ANC), hemoglobin, and platelet count were measured using standard techniques known in the art.

[1580] Intent to treat (ITT) patients are defined as all randomized and treated subjects of each treatment group, regardless of whether or not the patient has any missing data points or has dropped out of the study. Modified intent to treat (MITT) patients are defined as those patients that could conceivably have a Week 24 visit based on their date of enrollment in the study.

[1581] Results and Discussion:

[1582] Subject demographics, antiviral response and hematologic reductions are summarized in Table 10 (preliminary interim analysis) and Table 11 (final interim analysis). Overall, all four treatment protocols were well tolerated and there were no significant difference between the treatment groups with respect to grade 3-4 lab values or discontinuations due to adverse events.

TABLE 10
Preliminary Interim Analysis of Demographic, Anti-viral Response, and
Hematological Effect

| | | HSA- | | HSA- |
|---|---|---|---|---|
| | | IFNα2b | HSA- | IFNα2b |
| | PEG-IFN | 1200 μg | IFNα2b | 1200 μg |
| | 180 μg Q1w | Q2w | 900 μg Q2w | Q4w |
| | (n = 114) | (n = 110) | (n = 118) | (n = 116) |
| Demographics | | | | |
| Male | 58% | 58% | 55% | 67% |
| Mean BMI (kg/m²) | 25.1 | 25.7 | 25.4 | 26.1 |
| BMI ≧25 kg/m² | 53% | 49% | 49% | 51% |
| Median HCV RNA | 6.0 | 6.0 | 6.1 | 6.1 |
| (log IU/ml) | | | | |
| RNA ≧800,000 | 62% | 55% | 56% | 62% |
| IU/ml | | | | |
| Efficacy at Week 12 | | | | |
| HCV RNA Negative | 70/112 | 77/104 | 74/112 | 57/109 |
| (<LOQ) | (62.5%)^{¶} | (74.0%)^{¶} | (66.1%) | (52.3%)* |
| BMI <25 kg/m² vs. | 71.1% vs. | 74.1% vs. | 70.7% vs. | 55.6% vs. |
| ≧25 kg/m² | 54.2% | 74.0% | 61.1% | 49.1% |
| EVR12 (≧2 log | 96/112 | 91/104 | 90/112 | 80/109 |
| reduction) | (85.7%) | (87.5%) | (80.4%) | (73.4%) |
| 2^{nd} phase slope >0.6 | 49% | 58% | 52% | 42% |
| log/wk | | | | |
| Normalization of | 12/73 | 17/80 | 18.81 | 27/83 |
| ALT | (16.4%) | (21.2%) | (22.2%) | (32.5%)^{#} |
| Laboratory at Week | | | | |
| 12 | | | | |
| ANC <750/mm³ | 17.5% | 20.0% | 22.0% | 4.3%** |
| ANC <500/mm³ | 2.6% | 3.6% | 3.4% | 0.9% |
| Hb <12 g/dL | 64% | 70.0% | 69.5% | 49.1%** |
| Platelet <50,000/ | 3.5% | 2.7% | 1.7% | 0.9% |
| mm³ | | | | |

*p-value <0.05 HSA-IFNα2b 1200 μg Q2w vs. Q4w;
^{¶}p-value 0.068 HSA-IFNα2b 1200 μg Q2w vs. PEG-IFN;
^{#}p-value <0.05 HSA-IFNA2B 1200 μg Q4w vs. PEG-IFN;
**p-value <0.05 HSA-IFNα2b 1200 μg Q4w vs. all other groups

[1583] TABLE 11
Final Interim Analysis Demographic, Anti-viral Response,
and Hematological Effect

| | | HSA- | | HSA- |
|---|---|---|---|---|
| | | IFNα2b | HSA- | IFNα2b |
| | PEG-IFN | 1200 μg | IFNα2b | 1200 μg |
| | 180 μg Q1w | Q2w | 900 μg Q2w | Q4w |
| | (n = 114) | (n = 110) | (n = 118) | (n = 116) |
| Demographics | | | | |
| Male | 58% | 58% | 56% | 67% |
| Mean BMI (kg/m²) | 25.1 | 25.7 | 25.6 | 26.0 |
| BMI ≧25 kg/m² | 50% | 48% | 51% | 50% |
| Median HCV RNA | 6.1 | 6.0 | 6.1 | 6.1 |
| (log IU/ml) | | | | |
| RNA ≧800,000 | 62% | 55% | 56% | 62% |
| IU/ml | | | | |
| Efficacy at Week 12 | | | | |
| ITT | | | | |
| HCV RNA Negative | 75/114 | 82/110 | 82/118 | 62/116 |
| (<LOQ) | (65.8%)^{¶} | (74.5%)^{¶} | (69.5%) | (53.4%)* |
| BMI <25 kg/m² vs. | 71.9% vs. | 77.2% vs. | 74.1% vs. | 56.9% vs. |
| ≧25 kg/m² | 59.6% | 71.7% | 65.0% | 50.0% |
| EVR12 (≧2 log | 101/114 | 99/110 | 99/118 | 88/116 |
| reduction) | (88.6%) | (90.0%) | (83.9%) | (75.9%) |
| 2^{nd} phase slope >0.6 | 49% | 58% | 52% | 42% |
| log/wk | | | | |
| Normalization of | 11/73 | 17/79 | 17/80 | 26/83 |
| ALT | (15.1%) | (21.5%) | (21.3%) | (31.3%)^{#} |
| Efficacy at Week 20 | | | | |
| ITT | | | | |
| HCV RNA <LOD | 77/114 | 82/110 | 83/118 | 70/116 |
| (undetectable) | (67.5%) | (74.5%) | (70.3%) | (60.3%) |
| Efficacy at Week 24 | | | | |
| MITT | | | | |
| HCV RNA <LOD | 57/90 | 64/91 | 58/87 | 58/83 |
| (undetectable) | (63.3%) | (70.3%) | (66.7%) | (69.9%) |
| Laboratory at Week | | | | |
| 12 | | | | |
| ANC <750/mm³ | 20.2% | 21.8% | 22.0% | 6.0%** |
| ANC <500/mm³ | 3.5% | 3.6% | 3.4% | 1.7% |
| Hb <12 g/dL | 65% | 74% | 70% | 52%** |
| Platelet <50,000/ | 3.5% | 2.7% | 1.7% | 0.9% |
| mm³ | | | | |

*p-value <0.05 HSA-IFNα2b 1200 μg Q2w vs. Q4w;
^{¶}p-value 0.15 HSA-IFNα2b 1200 μg Q2w vs. PEG-IFN;
^{#}p-value <0.05 HSA-IFNA2B 1200 μg Q4w vs. PEG-IFN;
**p-value <0.05 HSA-IFNα2b 1200 μg Q4w vs. all other groups

[1584] Antiviral Response Predictors of SVR

[1585] An antiviral response predictor of SVR was defined as a negative HCV RNA titer (i.e., having an HCV RNA titer<LOQ) at week 12 of treatment with a second phase slope>0.6 log/wk (2^{nd} slope). The phases of the antiviral response curve slope are indicative of two activities. The first phase shows the direct antiviral activity of the response. The second phase predicts the destruction of the HCV infected cells by the treated compound. Thus a value of the second phase slope at >0.6 log/wk is a good predictor of SVR (positive predictive value (PPV)>90%).

[1586] Antiviral response predictors of SVR at week 12 ITT were greatest in the HSA-IFNα2b 1200 μg Q2w treatment group where 82/110 subjects or 74.5% ((final interim analysis) (77/104 or 74.0% (preliminary analysis))) had HCV RNA negative levels (i.e., levels below the LOQ (<43 IU/mL)) and 58% exhibited a second phase slope>0.6 log/wk, as compared to 75/114 subjects or 65.8% ((final interim analysis) (70/112 or 62.5% (preliminary interim analysis))) and 49% in the PEG-IFN control treatment. These data indicate that the HSA-IFNα2b 1200 μg Q2w treatment protocol has antiviral activity that is at least comparable to conventional treatment with PEG-IFN at week 12. Because RNA negativity (i.e., the number of patients having HCV RNA titer levels below the LOQ) at week 12 in the HSA-IFNα2b 1200 μg Q2w treatment protocol is approximately 9% (final interim analysis) and 12% greater (preliminary interim analysis) and the second phase slope is approximately 9% greater (for both the final and preliminary interim analysis) compared to the PEG-IFN control treatment, it is likely that the HSA-IFNα2b 1200 μg Q2w treatment protocol may result in superior efficacy over the conventional PEG-IFN treatment. The number of patients having HCV RNA negativity in the HSA-IFNα2b 900 μg Q2w and HSA-IFNα2b 1200 μg Q4w treatment groups were similar to conventional treatment with PEG-IFN.

[1587] Antiviral response predictors of SVR at weeks 20 and 24 are indicated as subjects having HCV RNA titers below the level of detection (LOD) (i.e., <10 IU/mL). Antiviral response predictors of SVR at week 20 was greatest in the HSA-IFNα2b 1200 μg Q2w treatment group, where 82/110 subjects or 74.5% (final interim analysis) had undetectable HCV RNA levels (i.e., <10 IU/mL) as compared to 77/114 or 67.5% (final interim analysis) in the PEG-IFN control treatment. Similarly, antiviral response predictors of SVR at week 24 was greatest in the IFNα2b 1200 μg Q2w treatment group where 64/91 or 70.3% (final interim analysis) had undetectable HCV RNA levels whereas the PEG-IFN control treatment had 57/90 or 63.3% with undetectable HCV RNA levels. Both the week 20 and 24 data indicate that the HSA-IFNα2b 1200 μg Q2w treatment protocol has antiviral activity and safety that is at least comparable to conventional treatment with PEG-IFN with an improved dosing schedule.

[1588] Normalization of ALT Levels

[1589] A common measurement of liver function in a patient is the level of alanine transferase (ALT). One of the hallmarks of HCV infected patients is high serum ALT levels that are indicative of liver damage. Thus, the normalization of ALT levels corresponds with improvement in liver function and has a favorable prognosis for responding to treatment. Although all treatment protocols exhibited some ability to normalize ALT levels, the most dramatic effect was observed in the HSA-IFNα2b 1200 μg Q4w treatment protocol, where over twice as many patients (final and preliminary interim analysis) achieved normalized ALT levels as compared to conventional treatment with PEG-IFN. Thus, HSA-IFNα2b dosed at 1200 μg Q4w is surprisingly more effective than conventional PEG-IFN treatment in normalizing liver function in genotype 1, IFN-naïve HCV patients.

[1590] Hematological Effects

[1591] Ensuring compliance and exposure to full doses of IFN and RBV in combination treatment protocols is critical for maximizing SVR rates.

[1592] Hematological reductions are common during combination treatment with IFN and RBV. Reductions in hemoglobin (Hb) due to RBV-induced hemolysis require dose reduction in RBV. In particular, Hb<12 g/dL requires reducing RBV from 1000-1200 mg/day to 800 mg/day. RBV dose is critical to prevent HCV relapse. The HSA-IFNα2b 1200 μg Q4W treatment protocol surprisingly had significantly fewer reductions in Hb<12 g/dL (52% vs. 65% for PEG-IFN (final interim analysis); 49.1 vs. 64% for PEG-IFN (preliminary interim analysis)). This may translate to a lower relapse rate with the HSA-IFNα2b 1200 μg Q4W treatment protocol, allowing for improved SVR.

[1593] Reductions in ANC<750/mm³ requires dose reducing the IFN component of the combination treatment. Surprisingly, the HSA-IFNα2b 1200 μg Q4W treatment protocol had significantly fewer ANC<750/mm³ compared to PEG-IFN (6% vs. 20.2%, respectively (final interim analysis); 4.3% vs. 17.5% (preliminary interim analysis)). This again may translate to higher SVE rates given the fewer dose reductions required with the HSA-IFNα2b 1200 μg Q4W treatment protocol.

[1594] Similar hematological reductions occurred across the HSA-IFNα2b Q2w and PEG-IFN treatment groups at week 12. Surprisingly, however, the hematological reductions observed in the HSA-IFNα2b 1200 μg Q4w treatment group at week 12 were approximately 75% lower than those observed in the PEG-IFN treatment group. These results indicate that HSA-IFNα2b Q4w may offer a superior safety profile and improved relapse rate as compared to conventional PEG-IFN treatment.

[1595] Conclusion

[1596] At week 12, the maximal antiviral activity in genotype 1, IFN-naïve HCV was observed in the HSA-IFNα2b 1200 μg Q2w treatment group. Similar effects on hematological reductions were also observed in the HSA-IFNα2b 1200 μg Q2w and PEG-IFN treatment groups. Moreover, at weeks 20 and 24, the maximal antiviral activity was also observed in the HSA-IFNα2b 1200 μg Q2w treatment group. Comparable antiviral activity was continued to be observed at weeks 20 and 24 in the HSA-IFNα2b 900 μg Q2w treatment group. Accordingly, HSA-IFNα2b 900 μg Q2w may offer at least a comparable efficacy and safety profile to the current standard of care, PEG-IFN, with an improved dosing schedule, translating into a greater convenience for the patient. Additionally, 1200 μg Q2w may offer at least a comparable safety profile to the current standard of care, PEG-IFN, with a possible superior efficacy and an improved dosing schedule, translating into a greater convenience for the patient.

[1597] Treatment with the HSA-IFNα2b 1200 μg Q4w protocol surprisingly showed comparable efficacy at week 12 compared to the conventional PEG-IFN treatment even though subjects receiving the PEG-IFN conventional treatment received three additional doses due to the dosing schedule. Comparable efficacy of the HSA-IFNα2b 1200 μg Q4w compared to the conventional PEG-IFN treatment continued through weeks 20 and 24. Improved ability to stabilize liver function and dramatically reduce the reduction in hematological factors was also observed with HSA-IFNα2b 1200 μg Q4w treatment group at week 12, indicating an improvement in liver injury and a reduction in incidence of dose-reduction or temporary termination, and possibly relapse following treatment, in these patients. Thus, these results suggest that the treatment with HSA-IFNα2b 1200 μg Q4w may offer efficacy comparable to combination treatment with PEG-IFN with the advantage of an improved dosing schedule, a greater ability to normalize liver function, and lower hematological reductions, resulting in greater compliance and convenience for the patient, and more favorable outcome post-therapy. In summary, given recent advances in the field of HCV therapeutics, an HSA-IFNα2b Q4W treatment protocol would have the ideal attributes (e.g., comparable efficacy, superior tolerability, superior convenience resulting in greater compliance) to become the interferon-backbone-of-choice for an interferon-antiviral combination therapy.

[1598] Taken together, these results suggest that combination treatment of genotype 1, IFN-naïve HCV patients with HSA-IFNα2b and RBV is at least as effective as treatment with the conventional PEG-IFN and RBV combination treatment with the advantage of an improved dosing schedule. Particularly, these results suggest that treatment with HSA-IFNα2b in combination with RBV can have either an superior efficacy with a similar safety profile, a similar efficacy with an superior safety profile, or both a superior efficacy and safety profile compared to conventional PEG-IFN combination treatment with RBV, but with an improved and highly advantageous dosing schedule.

### Example 83

### Response of Chronic Hepatitis C(HCV) Non-Responder Patients to HSA-IFNα2b, in Combination with Ribavirin

[1599] Background

[1600] Over four million people in the United States have been infected with the hepatitis C virus (HCV), making the virus the most common cause of liver disease in the United States. Interferon alpha (IFNα) with or without concurrent treatment of the antiviral molecule, ribavirin (RBV), has historically been recognized as the most effective treatment for patients. More recently, pegylated forms of interferon alpha have been approved for treatment of HCV in combination with RBV. These peglyated interferons have been shown to be more effective in treating HCV than the standard interferon or interferon in combination with ribavirin therapies and have become the conventional treatment for HCV.

[1601] However, this treatment has significant practical limitations. In addition to the well-known side effects that substantially decrease a patient's quality of life during therapy and the considerable rate of significant hematological reductions associated with the conventional therapy, the conventional therapy is ineffective for a large proportion of the patients who undergo the current treatment for HCV. Clinical studies of treatment of HCV patients who have not previously received an IFNα-RBV therapy have shown that approximately 45% of patients who commence the conventional treatment fail to clear HCV and remain chronically infected (e.g., non-responders). In the community, the proportion of patients responding to therapy is considerably less.

[1602] Clinical investigators have responded to the need of the non-responder population of HCV patients who had failed to respond to a previous treatment with IFNα or in combination with RBV by retreating these patients with the conventional therapy of pegylated IFNα and RBV. See, Shiffman et al., “Peginterferon alfa-2a and ribavirin in patients with chronic hepatitis C who have failed prior treatment,” Gastroenterology 126(4):1015-23 (2004). Although 35% of patients enrolled in this trial had no evidence of HCV RNA after 20 weeks of retreatment with the conventional therapy, many of these patients relapsed after treatment was discontinued. Thus, only 18% of the patients actually achieved a sustained viral response (SVR) and were cured of HCV. Similarly, when non-responder patients who had failed a previous treatment with conventional pegylated IFNα therapy were retreated with another pegylated IFNα, only ˜5-10% of these patients were able to achieve SVR based on anecdotal evidence. Thus, the population of patients who have not only failed one interferon therapy but have failed all current interferon therapies continues to significantly grow. Accordingly, there is a clear need for improved therapeutic protocols not only for the treatment of HCV in general but also for alternative therapies for treatment of those patients who have been previously treated with an interferon therapy (e.g., IFNα treatment-experienced) and who are non-responders, particularly those non-responder patients who are the most difficult to treat (e.g., patients who have failed previous treatment or retreatment with the current conventional care).

[1603] Rationale

[1604] HSA-IFNα2b was generated by genetically fusing mature albumin at its C-terminus to the N-terminus of mature interferon α-2b. The safety, tolerability, and efficacy of treatment with HSA-IFNα2b in combination with RBV was evaluated in randomized, open label clinical study in IFNα treatment-experienced, non-responder HCV human patients. For the purposes of this study, non-responders were defined as either those HCV patients who had stopped previous therapy at week 12 due a failure to achieve a 2-log reduction in HCV RNA levels (e.g., early viral response, week 12 or EVR12) or those patients who failed to achieve SVR after completion of the treatment protocol. Patients who relapsed after discontinuation of therapy were excluded from the study. In addition, at least 50% of the patients in the study previously failed a pegylated IFNα treatment protocol.

[1605] Methods

[1606] Human IFNα treatment-experienced, non-responder HCV patients who previously failed at least one IFNα treatment protocol were randomized into 3 subcutaneous (sc) HSA-IFNα2b treatment groups: (a) 900 μg once every 2 weeks (Q2w); (b) 1200 μg Q2w and (c) 1200 μg once every 4 weeks (Q4w). Each subject in each treatment group also received 1000-1200 mg/day RBV. After evaluation of safety data from these initial three cohorts, HSA-IFNα2b was dose escalated with the sequential addition of two additional cohorts who received HSA-IFNα2b at either 1500 μg Q2w or 1800 μg Q2w in combination with 1000-1200 mg/day RBV.

[1607] Treatment duration of the study is 48 weeks with a 24 week follow-up. The primary efficacy endpoint of the study is sustained virologic response (SVR).

[1608] HCV RNA titer was measured using a real-time PCR assay, Quantasure™ (Labcorp) with a sensitivity range of 10 IU to 100 million IU/mL). Alanine Transferase (ALT) and hematologic effects, including absolute neutrophil count (ANC), hemoglobin, and platelet count were measured using standard techniques known in the art.

[1609] Results and Discussion

[1610] Demographics

[1611] Numerous demographic characteristics have been identified that serve as independent indicators of those patients who have a prevalence toward non-responding to treatment. These key pre-treatment predictors of non-responsiveness include (1) genotype 1, (2) high baseline median HCV RNA level, (3) prior non response to PEG+RBV therapy, (4) African-American, (5) an advanced Fibrosis level of F3-F4 (using the METAVIR® classification), and (6) high BMI (e.g., ≧25 mg/kg). Perhaps, the best overall indicator for non-responsiveness is previous failure of PEG-RBV treatment and in the context of the number of previous IFN based regimens failed.

[1612] Subject demographics are summarized in Table 12. Overall, all the subject demographics were similar in all the treatment groups. The majority of subjects had been exposed to more than one IFNα containing regimen and had failed previous therapy with PEG+RBV. In addition, while the baseline disease characteristics were comparable across the 5 treatment groups, the 1800 μg Q2w treatment group had a significantly higher pre-treatment HCV RNA and the highest proportion of prior PEG+RBV failures. Thus, the subjects in the 1800 μg Q2w treatment group represented the most treatment-refractory patient population.

TABLE 12
Demographics and Baseline Characteristics

| | 900 μg | 1200 μg | 1200 μg | 1500 μg | 1800 μg | |
|---|---|---|---|---|---|---|
| | Q2w | Q2w | Q4w | Q2w | Q2w | |
| | N = 23 | N = 24 | N = 24 | N = 22 | N = 22 | P value |
| Genotype 1 | 20 (87.0%) | 24 (100%) | 22 (91.7%) | 21 (95.5%) | 21 (95.5%) | 0.4531 |
| Med HCV | 7.1 | 6.6 | 6.2 | 7.0 | 7.6 | <0.0001 |
| RNA | | | | | | |
| (log₁₀IU/mL) | | | | | | |
| PEG + RBV | 14 (60.9%) | 16 (66.7%) | 15 (62.5%) | 16 (72.2%) | 20 (90.9%) | 0.1370 |
| African | 2 (8.7%) | 3 (12.5%) | 1 (4.2%) | 7 (31.8%) | 2 (9.1%) | 0.0940 |
| American | | | | | | |
| F3-F4 | 7 (30.4%) | 7 (29.2%) | 4 (16.7%) | 9 (40.9%) | 7 (31.8%) | 0.5012 |
| BMI ≧25 kg/m2 | 20 (87.0%) | 21 (87.5%) | 18 (75.0%) | 18 (81.8%) | 17 (77.3%) | 0.7637 |

[1613] Efficacy and Biological Activity

[1614] Reductions in HCV RNA from pre-treatment levels over the treatment duration are shown in Table 13 for genotype 1, PEG+RBV nonresponders, the most refractory HCV patient population. At weeks 2-12, the magnitude of HCV RNA reduction was comparable across the 900-1500 μg treatment groups. However, the maximal viral load reductions were observed in the 1800 μg treatment group. This was surprising considering the higher levels of pre-treatment HCV RNA and the highest proportion of PEG+RBV failures in this treatment group. The magnitude of antiviral response over the first 12 weeks of therapy reflects the second phase slope of viral kinetics and is a positive predictor of SVR.

[1615] As shown in FIG. 12, the slopes of HCV RNA reduction are comparable at week 12 for the 900-1500 μg treatment groups in genotype 1, PEG+RBV nonresponders. Surprisingly, the magnitude of HCV RNA reduction is greatest for the 1800 μg treatment group. The HCV RNA reductions for the 1500 and 1800 μg treatment groups are comparable at week 24 in this sub-group of patients.

[1616] At week 24, the proportion of subjects who are HCV RNA negative was comparable across the 900-1500 μg treatment groups. Subjects were allowed to discontinue at week 24 for lack of efficacy at the discretion of the investigator and given the cumulative data from interferon-based regimens demonstrating the high negative predictive value of lack of EVR12 and week 24 RNA negativity for SVR. The overall end-of-treatment response (ETR, HCV negative at week 48) was 30% (22/73) for the 900-1200 μg treatment groups. Thus, a high proportion of subjects who became HCV RNA negative at week 12 (e.g., EVR12) or at week 24 achieved ETR. In addition, the majority of subjects (13/22) continued to be HCV RNA negative at the week 12 follow-up after 48 weeks of treatment. This indicates that the potential SVR following treatment with HSA-IFNα2b/RBV is 18%.

[1617] In summary, these data indicate that treatment of IFNα treatment-experienced, non-responder HCV patients, with a high percentage of PEG+RBV failures with 900-1200 μg of HSA-IFNα2b in combination with RBV results in robust and comparable antiviral activity. A low viral breakthrough (e.g., HCV RNA undetectable but subsequently positive at two or more time points) and relapse rate was also observed in this treatment refractory non-responder population. In addition, a significantly greater reduction was also observed in the 1800 μg treatment group over the first 12 weeks of therapy, indicating that patients treated at this dose with HSA-IFNα2b in combination with ribavirin may have a significant increase in SVR rates.

TABLE 13
Antiviral Response for GT1 and PEG + RBV Non-responders

| | 900 μg | 1200 μg | 1200 μg | 1500 μg | 1800 μg |
|---|---|---|---|---|---|
| | Q2w | Q2w | Q4w | Q2w | Q2w |
| | N = 12 | N = 16 | N = 13 | N = 15 | N = 19 |
| Week 12 | | | | | |
| EVR12^{a} | 5 (41.7%) | 4 (25%) | 3 (23.1%) | 5 (33.3) | 12 (63.2%) |
| 95% C.I.^{b} | (15.1%, | (7.3%, | (7.2%, | (11.8%, 61.6%) | (38.4%, 83.7%) |
| | 72.3%) | 52.4%) | 52.4%) | | |
| Week 24 | | | | | |
| Undetectable | 2 (16.7%) | 3 (18.8%) | 2 (15.4%) | 4 (26.7%) | 6 (31.6%) |
| HCV RNA | | | | | |
| 95% C.I.^{b} | (2.1%, 48.4%) | (4.0%, | (1.9%, | (7.8%, | (12.6%, |
| | | 45.6%) | 45.4%) | 55.1%) | 56.6%) |
| Week 48 | | | | | |
| ETR^{a} | 3 (25%) | 3 (18.8%) | 2 (15.4%) | | |
| 95% C.I.^{b} | (5.5%, 57.2%) | (4.0%, | (1.9%, | | |
| | | 45.6%) | 45.4%) | | |

^{a}Defined as undetectable HCV RNA or a ≧2-log reduction in HCV RNA
^{b}Exact 95% confidence interval.

[1618] Hematological Effects

[1619] Ensuring compliance and exposure to full doses of IFN and RBV in combination treatment protocols is critical for maximizing SVR rates.

[1620] Hematological reductions are common during combination treatment with IFN and RBV. RBV dose is critical to prevent HCV relapse. However, reductions in hemoglobin (Hb) and platelet (PLT) count due to RBV-induced hemolysis require dose reduction in RBV. Reductions in absolute neutrophil count (ANC)<750/mm³ requires dose reducing the IFN component of the combination treatment.

[1621] Although some ANC and PLT reductions were observed, these reductions were comparable across all Q2w treatment groups and reached a plateau around weeks 4 to 8. Likewise, the Hb reductions from baseline were comparable across all the Q2w treatment groups (including the 1800 μg treatment group) until week 12 and beyond. Reductions in hematologic values were less in the Q4w treatment group. Overall, there were 12/115 subjects who were dose reduced for the management of adverse events. Most dose reductions of HSA-IFNα2b resulted from reductions in ANC as outlined in the treatment protocol. There was no dose response observed between the Q2w treatment groups. Thus, there was no increased need for dose reduction observed in the higher dose treatment groups.

[1622] In summary, although there were some reductions in hematologic values observed with treatment of HSA-IFNα2b in combination with RBV, these reductions were comparable across the treatment groups, indicating that there was no significant difference in safety between treating IFNα treatment-experienced, non-responder HCV patients with 900-1800 μg of HSA-IFNα2b in combination with RBV.

[1623] Conclusion

[1624] Taken together, these results suggest that treatment with HSA-IFNα2b and RBV may be effective in achieving SVR, and thus eradicating HCV, in a significant portion of IFNα treatment-experienced, non-responder HCV patients, including those patients who previously failed a PEG+RBV treatment protocol. Particularly, these results suggest that treatment with HSA-IFNα2b 900-1200 μg in combination with RBV may result in 18% of patients achieving SVR, even after previously failing PEG+RBV. Moreover, the 1800 μg treatment group showed the greatest week 24 HCV RNA negativity rates in the most refractory patient population, indicating that this treatment may result in an even greater SVR rate for these patients. In addition, the safety profile was similar across all of the treatment groups of HSA-IFNα2b. Moreover, these results indicate that HSA-IFNα2b may be efficaciously administered every two to four weeks, providing an improved dosing schedule. Thus, these results indicate that the treatment of HSA-IFNα2b in combination with RBV provides an efficacious and safe treatment alternative with a high advantageous and improved dosing schedule, for those patients who fail an interferon-based therapy, particularly those that have failed the conventional pegylated interferon-RBV therapy that is currently lacking in the art.

### Example 84

### Anti-Viral Activity of HSA-IFNα2b, in Combination with Ribavirin in Genotype 2 or 3, Interferon-Naïve Chronic Hepatitis C(HCV) Patients

[1625] Background

[1626] With more than 170 million people infected with the Hepatitis C virus (HCV) worldwide, this virus has emerged as a significant public health concern and has rapidly become the most common cause of liver disease throughout the world. Acute HCV infection is usually asymptomatic, making early diagnosis problematic. In fact, HCV infection tends to be a chronic condition, where approximately 70% of acute infections becoming persistent. Thus, although the incidence of new infections has been on the decline, the prevalence of HCV infection is predicted to remain constant in the near future.

[1627] Interferon alpha (IFNα) with or without concurrent treatment of an antiviral molecule, ribavirin (RBV), has historically been recognized as the most effective treatment for patients with chronic hepatitis C(CHC). More recently, pegylated forms of interferon alpha have been approved for treatment of HCV in combination with RBV. These peglyated interferons have been shown to be more effective in treating HCV than the standard interferon or interferon in combination with ribavirin therapies and have become the conventional treatment for HCV.

[1628] Overall sustained anti-viral responses (SVR) to the currently recommended therapy vary greatly in CHC patients, depending on viral and host characteristics, particularly viral genotype. For example, SVR rates range from approximately 42-46% in patients with the more common genotype 1. On the other hand, patients with the less common genotypes 2 or 3 experience SVR rates at 76-80%. In addition, genotype 2 or 3 patients, who are considerably less difficult to treat than genotype 1 patients can be treated for a shorter duration of therapy with a lower dose of ribavirin.

[1629] Although the currently recommended therapy for genotype 2 or 3 of pegylated interferon in combination with RBV for 24 weeks followed by a 24 week follow-up period results in a significant proportion of patients achieving SVR, this treatment protocol still retains significant practical limitations common to IFN-based therapies. In particular, the currently recommended therapy remains plagued by adverse effects that substantially decrease the patient's quality of life after each administration. Thus, there is a continued need for new treatment regimens that are efficacious and better tolerated by patients infected with genotype 2 or 3 HCV.

[1630] Rationale

[1631] HSA-IFNα2b was generated by genetically fusing mature albumin at its C-terminus to the N-terminus of mature interferon α-2b. The safety and efficacy of treatment with HSA-IFNα2b in combination with RBV was evaluated in a randomized, multi-center, open-label clinical study in genotype 2 or 3, IFN-naïve CHC human patients.

[1632] Methods

[1633] 43 human HCV patients who were either genotype 2 or 3, IFN-naive were randomized into two subcutaneous (sc) HSA-IFNα2b treatment groups: (a) 1500 μg dosed every two weeks (Q2w) or (2) 1500 μg dosed every four weeks (Q4w). Each subject in each treatment group also received in 800 mg/day of RBV. The primary basis for stratification included genotype (2 or 3) and HCV RNA (<800,000 IU/mL or ≧800,000 IU/mL).

[1634] Treatment duration of the study is 24 weeks with a 24 week follow-up. The primary efficacy end-point is sustained virologic response (SVR).

[1635] HCV RNA titer was measured using real-time PCR, Quantasure™ (Labcorp) with a sensitivity range (limit of quantitation (LOQ)) of 43 IU to 69 million IU/mL. Insulin resistance was assessed using Homeostasis Assessment Model (HOMA).

[1636] Intent to treat (ITT) patients are defined as all randomized and treated subjects of each treatment group, regardless of whether or not the patient has any missing data points or has dropped out of the study. Modified intent to treat (MITT) patients are defined as those patients that could conceivably have a Week 12 visit based on their date of enrollment in the study.

[1637] Results and Discussion

[1638] Subject demographics and antiviral response at weeks 4 and 12 are summarized in Table 14. Overall, HSA-IFNα2b was well-tolerated in both treatment groups.

TABLE 14
Demographics and Anti-Viral Response.

| | HSA-IFNα2b | HSA-IFNα2b |
|---|---|---|
| | 1500 μg Q2w | 1500 μg Q4w |
| | (N = 21) | (N = 22) |
| Demographics | | |
| % male | 71.4% | 68.2% |
| % HCV RNA ≧800,000 | 71.4% | 59.1% |
| Mean HOMA pre-treatment | 2.2 | 2.5 |
| Week 4 (<LOQ) ITT | 16/21 (76.2%) | 15/22 (68.2%) |
| Genotype 2 | 8/10 | 6/10 |
| Genotype 3 | 8/11 | 9/12 |
| Week 12 (<LOQ) MITT | 14/17 (82.4%) | 16/18 (88.9%) |
| Genotype 2 | 7/9 | 9/9 |
| Genotype 3 | 7/8 | 7/9 |

ITT = intent to treat;
MITT = modified intent to treat (subjects eligible for week 12 visit)

[1639] The magnitude of HCV RNA reduction and the proportion of genotype 2 or 3 patients with HCV RNA<LOQ were comparable across both the HSA-IFNα2b Q2w and HSA-IFNα2b Q4w treatment groups. At week 4, the proportion of genotype 2 or 3 patients with HCV RNA<LOQ was 76.2% in the 1500 μg Q2w and 68.2% in the 1500 μg Q4w treatment group. At week 12, a high proportion of genotype 2 or 3 patients in both treatment groups had HCV RNA<LOQ (82.4% in the 1500Q2w and 88.9% in the 1500Q4w).

[1640] Thus, these results indicate that the treatment of genotype 2 or 3 CHC patients with 1500 μg HSA-IFNα2b at either Q2w or Q4w weeks results in a robust antiviral response rate. Moreover, treatment with the HSA-IFNα2b 1500 μg Q4w protocol showed comparable efficacy to treatment with the HSA-IFNα2b 1500 μg Q2w protocol in genotype 2 or 3 patients. Thus, these results suggest that the treatment with HSA-IFNα2b 1500 μg at either Q2w or Q4w is at least as effective as the currently recommended therapy for patients infected with HCV genotype 2 or 3 with the advantage of a vastly improved dosing schedule, potentially resulting in superior tolerability and convenience for the patient.

### Example 85

### Quality of Life (QOL) of Genotype 1, Interferon-Naïve Chronic Hepatitis C(HCV) Patients Treated with HSA-IFNα2b, in Combination with Ribavirin Patients

[1641] Background

[1642] As previously noted, the conventional treatment for genotype 1, interferon-naïve (IFN-naïve) HCV patients with pegylated interferon a in combination with ribavirin (RBV) for 48 weeks has significant practical limitations. Due to the well-known side effects of currently recommended interferon therapy, patients' quality of life is substantially decreased after each administration of interferon. Current protocols require dosing at least weekly, resulting in a prolonged period of decreased quality of life and increase in disability days due to treatment. Large numbers of patients discontinue treatment as a result, with some studies reporting discontinuation rates over 50%. Thus, there is an clear need for improved therapeutic protocols for the treatment of genotype 1 HCV in IFN-naïve patients with improved impact on quality of life compared to the current standard of care.

[1643] Rationale

[1644] The safety and efficacy of treatment with HSA-IFNα2b in combination with RBV was evaluated in an active controlled clinical study in genotype 1, IFN-naïve HCV human patients, and compared to conventional treatment with PEG-IFNα-2a (PEG-IFN) in combination with RBV as an active control as described in Example 82. During the first twelve weeks of therapy, the effects on QOL and disability days (e.g., days missed from work) of treatment with treatment with HSA-IFNα2b in combination with RBV were compared with PEG-IFN in combination with RBV.

[1645] Methods

[1646] 458 human, genotype 1 HCV patients were randomized and treated as described in Example 82. QOL as determined by the SF-36v2® measurement model (QualityMetric, Lincoln, R.I.) and disability days were assessed pre-treatment, and at week 4 and week 12 of treatment. In particular, eight SF-36v2 domains were assessed: physical functioning (PF), role-physical (RP), bodily pain (BP), general health (GH), vitality (VT), social functioning (SF), role-emotional (RE), and mental health (MH). The first four domains (PF, RP, BP, and GH) correspond to the Physical Health Component and the remaining four domains (VT, SF, RE, and MH) correspond to the Mental Health Component of the QOL model.

[1647] Transformed (raw) scores of the eight SF-36v2 domains, as well as norm-based physical component summary (PCS) score and mental component summary (MCS) score were evaluated through week 12 of treatment.

[1648] Results and Discussion

TABLE 15
Quality of Life Measurements

| | | | HSA- | HSA- |
|---|---|---|---|---|
| | | HSA- | IFNα2bC | IFNα2b |
| | PEG-IFN | IFNα2b | 1200 μg | 1200 μg |
| | 180 μg Qw | 900 μg Q2w | Q2w | Q4w |
| | (n = 114) | (n = 118) | (n = 110) | (n = 116) |
| SF-36 Domain | Mean change (worsening) from baseline to Week 12 | | | |
| (MCID) | in SF-36 QOL parameters | | | |
| PCS (2.6) | −8.0 | −5.6* | −6.5 | −6.0 |
| Physical | −18 | −14 | −16 | −13 |
| Functioning (5) | | | | |
| Bodily Pain (4) | −21 | −11*^{#} | −14^{#} | −15^{#} |
| MCS (2.7) | −6.3 | −3.6*^{#} | −4.9 | −5.0 |
| Vitality (4.2) | −19 | −13*^{#} | −17 | −16 |
| Mental | −11 | −4*^{#} | −7^{#} | −4*^{#} |
| Health (4) | | | | |
| Social | −20 | −10*^{#} | −15 | −19 |
| Functioning (6) | | | | |
| Missed work | Number of days missed in the prior month among | | | |
| at Week 4 | subjects working for pay at the time of assessment | | | |
| Mean days | 4 | 1* | 3 | 3 |
| missed | | | | |
| ≧3 days | 21/63 (33%) | 5/66 (8%)* | 17/61 (28%) | 15/62 (24%) |
| ≧7 days | 14/63 (22%) | 3/66 (5%)* | 8/61 (13%) | 7/62 (11%) |
| Missed work | | | | |
| at Week 12 | | | | |
| Mean days | 4 | 1* | 3 | 3 |
| missed | | | | |
| ≧3 days | 21/69 (30%) | 7/70 (10%)* | 13/59 (22%) | 17/72 (24%) |
| ≧7 days | 12/69 (17%) | 3/70 (4%)* | 7/59 (12%) | 8/72 (11%) |

*p-value <0.05 vs. Peg-IFN;
^{#}exceeds (MCID) minimal clinically important difference

[1649] At week 12, QOL for patients receiving 900 μg HSA-IFNα2b Q2w was improved relative to PEG-IFN for every measure, achieving statistical significance in MCS and PCS, as well as 5 of the 8 individual domains. In the 1200 μg Q2w and 1200 μg Q4w HSA-IFNα2b treatment groups, worsening of QOL was reduced relative to PEG-IFN in virtually every measure, with clinically significant differences observed in both bodily pain and mental health.

[1650] Overall, genotype 1 HCV patients in any of the HSA-IFNα2b treatment groups missed fewer days of work (MDW) due to their HCV infection and subsequent therapy than genotype 1 HCV patients in the PEG-IFN treatment group. In particular, patients receiving 900 μg HSA-IFNα2b Q2w had 75% fewer MDW and patients receiving 1200 μg HSA-IFNα2b Q2w or 1200 μg HSA-IFNα2b Q4w had 25% fewer MDW than patients receiving PEG-IFN.

[1651] Taken together with the antiviral activity of HSA-IFNα2b shown in Example 82, these results suggest that combination treatment of genotype 1, IFN-naïve HCV patients with HSA-IFNα2b and RBV is at least as effective as treatment with the conventional PEG-IFN and RBV combination treatment with the advantage of an improved dosing schedule and a improved QOL. Particularly, these results suggest that treatment with HSA-IFNα2b in combination with RBV can provide an improved and highly advantageous treatment protocol over the conventional PEG-IFN combination treatment with RBV by providing patients with a reduction in worsening of QOL indicia and fewer missed days of work over that obtainable with the PEG-IFN combination treatment with RBV.

### Example 86

### In Vivo Induction of cGMP by HSA-BNP (Construct ID #3959) in a Normal Pig Model

[1652] Rationale

[1653] The ability of Brain (B type) natriuretic peptide (BNP) to mediate cellular effects such as modification of renal function and vascular tone is well-known in the art. The activity of BNP is dependent upon its binding to and subsequent activation of natriuretic receptor A (NPR-A) which is a guanylyl cyclase. The activation of NPR-A by BNP leads to an elevation of intracellular cGMP levels that can be measured by assays known in the art, such as, for example, ELISA. The ability of HSA-BNP (CID 3959) to induce the production of cGMP in vivo was tested in a normal pig model.

[1654] Methods

[1655] HSA-BNP (CID 3959) was generated by genetically fusing mature albumin at its C-terminus to the N-terminus of a C-terminally truncated form of BNP (amino acids 1 to 29).

[1656] Normotensive, healthy pigs (n=4-6/group) were administered a single bolus of 5 mg/kg HSA-BNP (CID 3959) or formulation vehicle alone at time 0. Plasma and urine were collected at 1, 8, 16, 24, 48, and 72 hours post injection. cGMP levels in the collected plasma and urine were measured by commercially available ELISA (Molecular Dynamics).

[1657] Results

[1658] Single IV bolus of 5 mg/kg HSA-BNP (CID 3959) resulted in a significant elevation of both plasma (FIG. 13A) and urine (FIG. 13B) cGMP levels at 1 hour after IV administration. cGMP levels declined gradually to baseline levels at 24 hours in the plasma and by 48-72 hours in the urine.

### Example 87

### Natriuresis Activity of BNP-HSA Fusion Construct in a In Vivo Pacing Model of Heart Failure

[1659] Background

[1660] Administration of exogenous BNP has been utilized to facilitate natriuresis in congestive heart failure (CHF). However, recent studies have suggested that BNP administration can adversely affect renal function. The effect on renal or left ventricular (LV) function of HSA-BNP (CID 3959) was assessed in an in vivo severe CHF pig model. Surprisingly, the results of this study demonstrate that unlike BNP administration, acute infusion of HSA-BNP (CID 3959) can induce natriuresis without adversely affecting left ventricular or renal function.

[1661] Methods

[1662] HSA-BNP (CID 3959) was generated by genetically fusing mature albumin at its C-terminus to the N-terminus of a C-terminally truncated form of BNP (amino acids 1 to 29).

[1663] CHF was induced in 18 pigs by chronic pacing at 240 bpm for 3 weeks. 8 pigs served as reference controls. The following baseline characteristics were significantly reduced with CHF compared to reference controls. Baseline measurements were taken using techniques known in the art.

TABLE 16
Baseline measurements in CHF-induced pigs vs. reference control pigs

| | CHF-Induced | |
|---|---|---|
| | Pigs | Control Pigs |
| Left Ventricular Fractional Shortening | 21 ± 2 | 32 ± 2 |
| by Echocardiography (LVFS) (%) | | |
| Renal Vascular Blood Flow using | 1.73 ± 0.09 | 2.23 ± 0.26 |
| Microspheres (RenFlow) (mL/min/g) | | |
| Sodium Clearance (Na_{CL}) (mL/min) | 0.43 ± 0.11 | 4.35 ± 2.45 |
| Fractional Excretion of Sodium (FE_{Na}) | 0.25 ± 0.07 | 0.80 ± 0.32 |
| (%) | | |

[1664] Following baseline measurements, animals with evidence of heart failure (e.g., LV dilation occurred with a subsequent decline in fractional shortening) were randomized for this study. The animals were anesthetized (n=10/group), administered either vehicle, 2 mg/kg HSA-BNP (CID 3959) or 6 mg/kg HSA-BNP (CID 3959) IV and monitored for 4 hours. End diastolic diameter was measured by echocardiography.

[1665] Results and Conclusions

[1666] Neither dose of HSA-BNP (CID 3959) had a significant effect on heart rate, mean arterial blood pressure, left ventricular end diastolic pressure, mean pulmonary arterial pressure, left ventricular peak pressure, peak positive dp/dt or cardiac output (data not shown). No change in coronary blood flow was seen in animals infused with either dose of HSA-BNP (CID 3959) (data not shown). In addition, although infusing the animals with 6 mg/kg of HSA-BNP (CID 3959) resulted in increased creatinine clearance and fractional sodium excretion 30 minutes post-infusion, neither reached statistical significance over baseline (data not shown). Similarly, infusion of 6 mg/kg of HSA-BNP (CID 3959) resulted in a non-significant reduction in plasma renin activity and endothelin plasma levels compared to vehicle (data not shown).

[1667] Significant increases in sodium clearance (492±281% at 30 minutes post-infusion and 950±483% at 60 minutes post-infusion) over vehicle were seen in animals infused with 6 mg/kg HSA-BNP (CID 3959). Additionally, end-diastolic diameter changes caused by the pacing were significantly reduced after either dose of HSA-BNP (CID 3959) compared to vehicle (FIG. 14A). Moreover, changes in left ventricular fractional shortening were caused by the pacing were reduced after either dose of HSA-BNP (CID 3959) compared to vehicle, with the reduction caused by the 2 mg/kg dose of HSA-BNP (CID 3959) being significant over vehicle (FIG. 14B).

[1668] Thus, taken together, these results demonstrate that acute infusion of HSA-BNP (CID 3959) can induce natriuresis without adversely affecting left ventricular or renal function in an in vivo CHF model.

### Example 88

### Effect of HSA-BNP (Construct ID #3959) on Cardiorenal Function in Anesthetized Normal Dogs

[1669] Rationale

[1670] The ability of Brain (B type) natriuretic peptide (BNP) to mediate modification of renal function and vascular tone is well-known in the art. A particularly useful model for studying the effects of BNP on cardiorenal function is the dog. Accordingly, an extensive assessment of cardiorenal effects, including hemodynamic, renal, and hormonal effects, of HSA-BNP (CID 3959) was performed in an anesthetized normal dog model.

[1671] Methods

[1672] HSA-BNP (CID 3959) was generated by genetically fusing mature albumin at its C-terminus to the N-terminus of a C-terminally truncated form of BNP (amino acids 1 to 29).

[1673] Hemodynamic, renal, and hormonal parameters of cardiorenal function were evaluated in this study. In particular, the hemodynamic parameters included measurement of cardiac output, mean arterial pressure, pulmonary capillary wedge pressure, and mean pulmonary artery pressure. Renal parameters included measurement of urine flow, sodium excretion, glomerular filtration rate (GFR), and renal blood flow. Hormonal parameters included measurement of plasma cGMP, renin, angiotensin II, aldosterone, and urinary cGMP.

[1674] Normal healthy mongrels (n=8/group) were fed a fixed sodium diet for 5 days prior to the start of the study. On the night before the acute experiment, the animals were fasted and given 300 mg of lithium carbonate for assessment of renal tubular function. On the day of the acute experiment, the dogs were anesthetized via IV with sodium pentobarbital (15 mg/kg), intubated, and mechanically ventilated with supplemental oxygen.

[1675] A flow-directed balloon-tipped thermodilution catheter was advanced into the pulmonary artery via the external jugular vein for cardiac hemodynamic measurement. The femoral artery was cannulated for blood pressure monitoring, blood sampling, and for insulin and normal saline infusion. The ureter of the left kidney was cannulated for urine collection. A calibrated electromagnetic flow probe was placed around the renal artery to measure renal blood flow (RBF).

[1676] On the day of the acute experiments, the dogs were administered a single IV bolus of HSA-BNP (CID 3959) at either 0.5 mg/kg or 5 mg/kg (n=8/group). Effects on cardiorenal function were monitored for 4.5 hours.

[1677] Cardiovascular parameters measured included mean arterial pressure (MAP), renal artery pressure (RAP), pulmonary artery pressure (PAP), cardiac output (CO), and pulmonary capillary wedge pressure (PCWP). CO was determined by thermodilution. MAP was assessed via direct measurement from the femoral arterial catheter. GFR was measured by insulin clearance.

[1678] Cardiovascular hemodynamics were measured at the start of each clearance. Arterial blood was collected in heparin and EDTA tubes and immediately placed on ice midway through each clearance. After centrifugation at 2,500 rpm at 4° C., plasma was decanted and stored at −20° C. until analysis. Urine was collected on ice during the entire period of each clearance for assessment of urine volume, electrolytes and insulin. Urine collected for cGMP analysis was heated to more than 90° C. before storage.

[1679] Results and Discussion

[1680] Hemodynamic Effects

[1681] FIGS. 15A-H show the effect of HSA-BNP (CID 3959) administered at 0.5 mg/kg (FIGS. 15A, C, E, and G) or 5 mg/kg (FIGS. 15B, D, F, and H) on hemodynamic performance over 4.5 hours post-infusion compared with baseline readings. Hemodynamic parameters were measure at baseline prior to the IV bolus of HSA-BNP (CID 3959) and at 30, 60, 90, 150, 210, and 270 minutes post-infusion.

[1682] The hemodynamic effects of HSA-BNP (CID 3959) were sustained over the 4.5 hr observation period. Both 0.5 and 5 mg/kg IV bolus of HSA-BNP (CID 3959) resulted in a statistically significant and sustained reduction in pulmonary capillary wedge pressure (PCWP) (FIGS. 15E and F). The magnitude of reduction in PCWP with these two doses was not significantly different.

[1683] Effects of HSA-BNP (CID 3959) were dose-related for pulmonary arterial pressure (PAP) (FIGS. 15G and H) and mean arterial pressure (MAP) (FIGS. 15C and D). Significant reductions in PAP were observed when the animals were dosed at 5 mg/kg (FIG. 15H). Likewise, a significant effect on MAP where observed at 270 minutes post-infusion in the 5 mg/kg treatment group (FIG. 15D).

[1684] Renal Effects

[1685] FIGS. 16A-H show the effect of HSA-BNP (CID 3959) administered at 0.5 mg/kg (FIGS. 16A, C, E, and G) or 5 mg/kg (FIGS. 16B, D, F, and H) on renal output and blood flood over the 4.5 hours post-infusion compared with baseline readings. Renal performance parameters were measured at baseline prior to IV bolus of HSA-BNP (CID 3959) and at 30, 60, 90, 150, 210, and 270 minutes post-infusion.

[1686] Administration of HSA-BNP (CID 3959) resulted in significant effects on renal function. Significantly elevated renal blood flow (FIGS. 16E and F), diuresis (FIGS. 16A and B), natriuresis (FIGS. C and d) were observed at both 0.5 and 5 mg/kg HSA-BNP (CID 3959). A dose-related trend in increased GFR was also apparent (FIGS. 16G and H).

[1687] The time to maximal effect of HSA-BNP (CID 3959) on the renal parameters tended to be slightly delayed compared with the hemodynamic effects. In addition, the magnitude of the increase in natriuresis and diuresis was significantly higher in the 5 mg/kg treatment group than in the 0.5 mg/kg treatment group.

[1688] Hormonal Effects

[1689] FIGS. 17A-F show the effect of HSA-BNP (CID 3959) administered at 0.5 mg/kg (FIGS. 17A, C, and E) or 5 mg/kg (FIGS. 17B, D, and F) on the RAAS hormones over 4.5 hours post-infusion compared with baseline readings. Plasma aldosterone, renin, and angiotensin II levels were measured at baseline prior to IV bolus of HSA-BNP (CID 3959) and at 30, 60, 90, 150, 210, and 270 minutes.

[1690] Administration with both 0.5 and 5 mg/kg IV bolus of HSA-BNP (CID 3959) resulted in a reduction of renin, angiotensin and aldosterone levels during the 4.5 hours post-infusion observation period. The effect on aldosterone levels was significant and sustained throughout the 270 minute study. Effects on renin and angiotensin II were significant between 30 and 90 minutes after administration of HSA-BNP (CID 3959) at both doses, but rebounded toward the end of the observation period.

[1691] Conclusion

[1692] This study demonstrates that HSA-BNP (CID 3959) behaves in a similar pharmacological manner as unfused BNP. Administration of HSA-BNP (CID 3959) in a single IV bolus at 0.5 and 5 mg/kg resulted in dose-dependent, significant, and sustained changes in multiple cardiorenal parameters that are consistent with its action as a long-acting form of BNP. In particular, administration of HSA-BNP (CID 3959) resulted in increased plasma and urine cGMP levels, reduced PCWP and PAP, increased natriuresis, diuresis, renal blood flow and glomerular filtration rate, decreased plasma, aldosterone, renin, and angiotensin II, and a slight reduction in MAP at the 5 mg/kg dose. Differential effect on component of the renin-angiotensin-adosterone system is somewhat unexpected result and may be a favorable attribute of HSA-BNP (CID 3959).

[1693] Taken as a whole, these results suggest that HSA-BNP (CID 3959) may administered at a dose that improves cardiorenal function without substantial unwanted reductions in systemic blood pressure.

### Example 89

### Effect of HSA-BNP (Construct ID #3959) on Blood Pressure in Telemeterized Beagles

[1694] Rationale

[1695] The ability of Brain (B type) natriuretic peptide (BNP) to mediate vascular tone is well-known in the art. As noted previously, a particularly useful model for studying the effects of BNP on cardiovascular function, including blood pressure, is the dog. Accordingly, the effect of intravenous (IV) administration of HSA-BNP (CID 3959) on cardiovascular function, including systolic and mean arterial blood pressure and heart rate was evaluated in conscious normal beagle dogs. Additionally, the effectiveness and duration of response of subcutaneous (SC) administration of HSA-BNP (CID 3959) was also evaluated.

[1696] Methods

[1697] Healthy beagles (n=4/group) were surgically implanted with a Data Sciences International radiotelemetry transmitter, which had systemic arterial blood pressure, heart rate, and ECG data collection capabilities. Following implantation, the dogs received either a single IV bolus of 0.1, 0.5, or 5 mg/kg of HSA-BNP (CID 3959) or vehicle.

[1698] Continuous recording of ECG parameters and systemic blood pressure were monitored for 48 hours following infusion. The dogs were followed for an additional 9 days (total time=11 days) with intermittent monitoring.

[1699] The effectiveness and duration of response of subcutaneous administration of HSA-BNP (CID 3959) on systemic blood pressure was evaluated by comparing the effect of administration of an IV bolus of unfused BNP (0.02 mg/kg) to administration of an SC administration of HSA-BNP (CID 3959) (10 mg/kg).

[1700] Results and Discussion

[1701] Effect of HSA-BNP (CID 3959) on Systolic and Mean Arterial Blood Pressure

[1702] FIGS. 18A-C show the effect of a single IV bolus of HSA-BNP (CID 3959) on the systolic and mean arterial blood pressure in awake dogs. Administration of 5 mg/kg HSA-BNP (CID 3959) resulted in gradual reductions in systolic blood pressure with a peak effect at approximately 16 hours and a return to baseline by 48 hours. A sustained reduction in systolic blood pressure of approximately 15 mmHg was apparent starting at 8 hours following drug administration and continuing through 20 hours following administration.

[1703] Administration of HSA-BNP (CID 3959) did not have any obvious effect on diastolic blood pressure or heart rate over the same observation period (data not shown).

[1704] Lower doses (e.g., 0.5 and 0.1 mg/kg) of HSA-BNP (CID 3959) were without obvious effect on either blood pressure or heart rate. In addition, there were no treatment-related changes on ECG parameters observed at any dose of HSA-BNP (CID 3959).

[1705] Comparison of IV Administered Unfused BNP Peptide to SC Administered HSA-BNP (CID 3959)

[1706] FIGS. 19A and B show the effect of an IV bolus of unfused BNP on systemic blood pressure in normal healthy beagles compared to a SC injection of HSA-BNP (CID 3959). Both HSA-BNP (CID 3959) and unfused BNP reduced systolic blood pressure in healthy beagles. The effect of unfused BNP was maximal at approximately 30 minutes and returned to baseline within hours. In contrast, the effect of HSA-BNP (CID 3959) was apparent approximately 10 hours after SC administration, reached a maximum at approximately 40 hours and returned to baseline between 48 and 72 hours post-injection. The slow onset effect of HSA-BNP (CID 3959) on blood pressure is consistent with its slow absorption (Tmax ˜36 hours in the dog). The long duration of effect of HSA-BNP (CID 3959) is consistent with its long half life (72 hours in the dog).

[1707] Taken as a whole, these results suggest that HSA-BNP (CID 3959) may administered to heart failure patients at a dose low enough to improve cardiorenal function without having an effect on systemic blood pressure.

[1708] The entire disclosure of each document cited (including patents, patent applications, patent publications, journal articles, abstracts, laboratory manuals, books, or other disclosures) as well as information available through Identifiers specific to databases such as GenBank, GeneSeq, or the CAS Registry, referred to in this application are herein incorporated by reference in their entirety.

[1709] Furthermore, the specification and sequence listing of each of the following International applications and U.S. applications are herein incorporated by reference in their entirety: International Application No. PCT/US02/40891, filed Dec. 23, 2002; International Applicaiton No. PCT/US2004/001369, filed Jan. 20, 2004; International Application No. PCT/US2005/004041, filed Feb. 9, 2005; U.S. application Ser. No. 10/775,204, filed Feb. 11, 2004; U.S. application Ser. No. 11/175,690, filed Jul. 7, 2005; U.S. application Ser. No. 11/429,373, filed May 8, 2006; U.S. application Ser. No. 11/429,276, filed May 8, 2006; U.S. application Ser. No. 11/429,374, filed May 8, 2006; and U.S. Provisional Application Nos. 60/707,521, filed Aug. 12, 2005; 60/712,386, filed Aug. 31, 2005; 60/732,724, filed Nov. 3, 2005; 60/776,914, filed Feb. 28, 2006; 60/781,361, filed Mar. 13, 2006; and 60/810,182, filed Jun. 2, 2006, and 60/813,682, filed Jun. 15, 2006.

What is claimed:

1. An albumin fusion protein comprising a member selected from the group consisting of:
(a) a Therapeutic protein X or a fragment or variant of a Therapeutic X and albumin or an albumin fragment or variant thereof;
(b) a Therapeutic protein X or a fragment or variant of a Therapeutic X and albumin or an albumin fragment or variant thereof, wherein said albumin or albumin fragment or variant thereof comprises the amino acid sequence of SEQ ID NO:1;
(c) a Therapeutic protein X or a fragment or variant of a Therapeutic X and albumin or an albumin fragment or variant thereof, of (a) or (b), wherein said fragment or variant of a Therapeutic X has a biological activity of the Therapeutic protein X, and wherein said albumin fragment or variant thereof has albumin activity;
(d) a Therapeutic protein X or a fragment of variant of a Therapeutic X and albumin or an albumin fragment or variant thereof, of (c), wherein said albumin activity is the ability to prolong the shelf life of the Therapeutic protein X compared to the shelf-life of the Therapeutic protein X in an unfused state;
(e) a Therapeutic protein X or a fragment of variant of a Therapeutic X and albumin or a fragment or variant thereof, of (c), wherein said albumin activity is the ability to prolong the serum half-life of the Therapeutic protein X compared to the serum half-life of the Therapeutic protein X in an unfused state;
(f) a Therapeutic protein X or a fragment of variant of a Therapeutic X and albumin or an albumin fragment or variant thereof, of (a)-(e), wherein the albumin fragment or variant comprises the amino acid sequence of amino acids 1-387 of SEQ ID NO:1;
(g) a Therapeutic protein X or a fragment of variant of a Therapeutic X and albumin or an albumin fragment or variant thereof, of (a) to (f), wherein the Therapeutic protein X or a fragment of variant of a Therapeutic X, is fused to the N-terminus of albumin, or the N-terminus of the albumin fragment or variant thereof;
(h) a Therapeutic protein X or a fragment of variant of a Therapeutic X and albumin or an albumin fragment or variant thereof, of (a) to (f), wherein the Therapeutic protein X or a fragment of variant of a Therapeutic X, is fused to the C-terminus of albumin, or the C-terminus of the albumin fragment or variant thereof;
(i) a Therapeutic protein X or a fragment of variant of a Therapeutic X and albumin or an albumin fragment or variant thereof, of (a) to (f), wherein the Therapeutic protein X or a fragment of variant of a Therapeutic X, is fused to the N-terminus and the C-terminus of albumin, or the N-terminus and the C-terminus of the albumin fragment or variant thereof;
j) a Therapeutic protein X or a fragment of variant of a Therapeutic X and albumin or an albumin fragment or variant thereof, of (a) to (f), which comprises a first Therapeutic protein X, or fragment or variant thereof, and a second Therapeutic protein X, or fragment or variant thereof, wherein said first Therapeutic protein X, or fragment or variant thereof, is different from said second Therapeutic protein X, or fragment or variant thereof;
(k) a Therapeutic protein X or a fragment of variant of a Therapeutic X and albumin or an albumin fragment or variant thereof, of (a) to (j), wherein the Therapeutic protein X or a fragment of variant of a Therapeutic X, is separated from the albumin or the albumin fragment or variant thereof by a linker;
(l) a Therapeutic protein X or a fragment of variant of a Therapeutic X and albumin or an albumin fragment or variant thereof, of (a) to (k), wherein the albumin fusion protein has the following formula:
R1−L−R2; R2−L−R1; or R1−L−R2−L−R1,
and further wherein R1 is Therapeutic protein:X, or fragment or variant thereof, L is a peptide linker, and R2 is albumin comprising the amino acid sequence of SEQ ID NO:1 or a fragment or variant of albumin;
(m) a Therapeutic protein X or a fragment of variant of a Therapeutic X and albumin or an albumin fragment or variant thereof, of (a) to (l), wherein shelf-life of the albumin fusion protein is greater than the shelf-life of the Therapeutic protein X or a fragment of variant of a Therapeutic X, in an unfused state;
(n) a Therapeutic protein X or a fragment of variant of a Therapeutic X and albumin or an albumin fragment or variant thereof, of (a) to (l), wherein serum half-life of the albumin fusion protein is greater than the serum half-life of the Therapeutic protein X or a fragment of variant of a Therapeutic X, in an unfused state;
(o) a Therapeutic protein X or a fragment of variant of a Therapeutic X and albumin or an albumin fragment or variant thereof, of (a) to (l), wherein the in vitro biological activity of a Therapeutic protein X or a fragment of variant of a Therapeutic X of said albumin fusion protein is greater than the in vitro biological activity of the a Therapeutic protein X or a fragment of variant of a Therapeutic X, in an unfused state; and
(p) a Therapeutic protein X or a fragment of variant of a Therapeutic X and albumin or an albumin fragment or variant thereof, of (a) to (l), wherein the in vivo biological activity of a Therapeutic protein X or a fragment of variant of a Therapeutic X of said albumin fusion protein is greater than the in vivo biological activity of the a Therapeutic protein X or a fragment of variant of a Therapeutic X, in an unfused state.

2. The albumin fusion protein of claim 1 expressed in host cell, wherein said host cell is a yeast, a mammalian, or a bacterial cell.

3. The albumin fusion protein of claim 1, wherein the albumin fusion protein further comprises a secretion leader sequence.

4. A composition comprising the albumin fusion protein of claim 1 and a pharmaceutically acceptable carrier.

5. A kit comprising the composition of claim 4.

6. A method of treating a disease or disorder in a patient, comprising the step of administering the albumin fusion protein of claim 1.

7. The method of claim 6, wherein the disease or disorder comprises indication Y.

8. The method of claim 7, wherein the disease or disorder is hepatitis C infection.

9. The method of claim 8, wherein said albumin fusion protein is expressed by a host cell comprising an albumin fusion construct selected from the group consisting of:
(a) Construct ID 2249;
(b) Construct ID 2343;
(c) Construct ID 2366;
(d) Construct ID 2381;
(e) Construct ID 2382;
(f) Construct ID 2410;
(g) Construct ID 3165;
(h) Construct ID 3422;
(i) Construct ID 3423;
(j) Construct ID 3424;
(k) Construct ID 3476;
(l) Construct ID 3960;
(m) Construct ID 4290;
(n) Construct ID 4291;
(o) Construct ID 4292;
(p) Construct ID 4295; and
(q) Construct ID 4296.

10. The method of claim 9, wherein said albumin fusion construct is (d).

11. The method of claim 9, wherein said albumin fusion protein is (g).

12. The method of claim 9, wherein said albumin fusion protein is (l).

13. The method of claim 11, wherein said patient having a hepatitis C infection is Treatment naïve or Treatment experienced.

14. The method of claim 13, wherein said Treatment experienced patient is a non-responder.

15. The method of claim 14, wherein said non-responder previously failed at least one combination treatment protocol comprising pegylated-interferon alpha and ribavirin.

16. The method of claim 13, wherein said hepatitis C infection is genotype 1 or genotype ⅔.

17. The method of claim 16, wherein said therapeutically effective amount of the albumin fusion protein is selected from the group consisting of:
(a) about 600 μg/dose;
(b) about 900 μg/dose;
(c) about 1000 μg/dose;
(d) about 1200 μg/dose;
(e) about 1800 μg/dose; and
(f) about 2000 μg/dose.

18. The method of claim 17, wherein said albumin fusion protein is dosed according to a dosing schedule selected from the group consisting of:
(a) once every week;
(b) once every two weeks;
(b) once every three weeks;
(c) once every four weeks; and
(d) once every five weeks.

19. A method of treating a patient having a hepatitis C infection with a therapeutically effective amount of an albumin fusion protein comprising mature interferon alpha-2b fused to mature albumin wherein said mature interferon alpha-2b is fused at the C-terminus of mature albumin and further wherein (1) said patient is Treatment naïve, (2) said hepatitis C infection is genotype 1, said therapeutically effective amount is about 900 μg/dose to about 1800 μg/dose, and said albumin fusion protein is dosed once every two weeks.

20. The method of claim 19, wherein said therapeutically effective amount is selected from the group consisting of:
(a) about 900 μg/dose;
(b) about 1200 μg/dose; and
(c) about 1800 μg/dose.

21. A method of treating a patient having a hepatitis C infection with a therapeutically effective amount of an albumin fusion protein comprising mature interferon alpha-2b fused to mature albumin wherein said mature interferon alpha-2b is fused at the C-terminus of mature albumin and further wherein (1) said patient is Treatment naïve, (2) said hepatitis C infection is genotype 1, said therapeutically effective amount is about 900 μg/dose to about 1800 μg/dose, and said albumin fusion protein is dosed once every four weeks.

22. The method of claim 21, wherein said therapeutically effective amount is selected from the group consisting of:
(a) about 900 μg/dose;
(b) about 1200 μg/dose; and
(c) about 1800 μg/dose.

23. A method of treating a patient having a hepatitis C infection with a therapeutically effective amount of an albumin fusion protein comprising mature interferon alpha-2b fused to mature albumin wherein said mature interferon alpha-2b is fused at the C-terminus of mature albumin and further wherein (1) said patient is Treatment experienced, (2) said hepatitis C infection is genotype 1, said therapeutically effective amount is about 1200 μg/dose to about 1800 μg/dose, and said albumin fusion protein is dosed once every two weeks.

24. The method of claim 23, wherein said therapeutically effective amount is selected from the group consisting of:
(a) about 1200 μg/dose;
(b) about 1500 μg/dose; and
(c) about 1800 μg/dose.

25. A method of treating a patient having a hepatitis C infection with a therapeutically effective amount of an albumin fusion protein comprising mature interferon alpha-2b fused to mature albumin wherein said mature interferon alpha-2b is fused at the C-terminus of mature albumin and further wherein (1) said patient is Treatment experienced, (2) said hepatitis C infection is genotype 1, said therapeutically effective amount is about 1200 μg/dose to about 1800 μg/dose, and said albumin fusion protein is dosed once every four weeks.

26. The method of claim 25, wherein said therapeutically effective amount is selected from the group consisting of:
(a) about 1200 μg/dose;
(b) about 1500 μg/dose; and
(c) about 1800 μg/dose.

27. A method of extending the shelf life or serum half life of Therapeutic protein X or a fragment of variant of a Therapeutic X, comprising the step of fusing the Therapeutic protein X or a fragment of variant of a Therapeutic X, to albumin, or albumin fragment or variant thereof, sufficient to extend the shelf-life or serum half life of the Therapeutic protein X or a fragment of variant of a Therapeutic X, compared to the shelf-life or serum half-life of the Therapeutic protein X or a fragment of variant of a Therapeutic X, in an unfused state.

28. A nucleic acid molecule comprising a polynucleotide sequence encoding the albumin fusion protein of claim 1.

29. A vector comprising the nucleic acid molecule of claim 28.

30. A host cell comprising the nucleic acid molecule of claim 28.

The application's sequence listing, which the Patent Office published only in electronic form, follows.

SEQUENCE LISTING (784 sequences)

SEQ ID NO: 1 - protein, 585 aa, Homo sapiens [sequence omitted]

SEQ ID NO: 2 - DNA, 1782 bp, Homo sapiens
gatgcacacaagagtgaggttgctcatcggtttaaagatttgggagaagaaaatttcaaagccttggtgttgattgcctttgctcagtatcttcagcagtgtccatttgaagatcatgtaaaattagtgaatgaagtaactgaatttgcaaaaacatgtgttgctgatgagtcagctgaaaattgtgacaaatcacttcataccctttttggagacaaattatgcacagttgcaactcttcgtgaaacctatggtgaaatggctgactgctgtgcaaaacaagaacctgagagaaatgaatgcttcttgcaacacaaagatgacaacccaaacctcccccgattggtgagaccagaggttgatgtgatgtgcactgcttttcatgacaatgaagagacatttttgaaaaaatacttatatgaaattgccagaagacatccttacttttatgccccggaactccttttctttgctaaaaggtataaagctgcttttacagaatgttgccaagctgctgataaagctgcctgcctgttgccaaagctcgatgaacttcgggatgaagggaaggcttcgtctgccaaacagagactcaaatgtgccagtctccaaaaatttggagaaagagctttcaaagcatgggcagtggctcgcctgagccagagatttcccaaagctgagtttgcagaagtttccaagttagtgacagatcttaccaaagtccacacggaatgctgccatggagatctgcttgaatgtgctgatgacagggcggaccttgccaagtatatctgtgaaaatcaggattcgatctccagtaaactgaaggaatgctgtgaaaaacctctgttggaaaaatcccactgcattgccgaagtggaaaatgatgagatgcctgctgacttgccttcattagctgctgattttgttgaaagtaaggatgtttgcaaaaactatgctgaggcaaaggatgtcttcctgggcatgtttttgtatgaatatgcaagaaggcatcctgattactctgtcgtgctgctgctgagacttgccaagacatatgaaaccactctagagaagtgctgtgccgctgcagatcctcatgaatgctatgccaaagtgttcgatgaatttaaacctcttgtggaagagcctcagaatttaatcaaacaaaactgtgagctttttgagcagcttggagagtacaaattccagaatgcgctattagttcgttacaccaagaaagtaccccaagtgtcaactccaactcttgtagaggtctcaagaaacctaggaaaagtgggcagcaaatgttgtaaacatcctgaagcaaaaagaatgccctgtgcagaagactatctatccgtggtcctgaaccagttatgtgtgttgcatgagaaaacgccagtaagtgacagagtcacaaaatgctgcacagagtccttggtgaacaggcgaccatgcttttcagctctggaagtcgatgaaacatacgttcccaaagagtttaatgctgaaacattcaccttccatgcagatatatgcacactttctgagaaggagagacaaatcaagaaacaaactgcacttgttgagcttgtgaaacacaagcccaaggcaacaaaagagcaactgaaagctgttatggatgatttcgcagcttttgtagagaagtgctgcaaggctgacgataaggagacctgctttgccgaggagggtaaaaaacttgttgctgcaagtcaagctgccttaggcttataacatctacatttaaaagcatctcag

SEQ ID NO: 3 - protein, 609 aa, Homo sapiens [sequence omitted]

SEQ ID NO: 4 - protein, 15 aa, Artificial Sequence
  turn: Linker peptide that may be used to join VH and VL domains in an scFv.
GGGGSGGGGSGGGGS

SEQ ID NO: 5 - DNA, 394 bp, Homo sapiens
gcggccgccggatgcaagggttcgaatcccttagctctcattattttttgctttttctcttgaggtcacatgatcgcaaaatggcaaatggcacgtgaagctgtcgatattggggaactgtggtggttggcaaatgactaattaagttagtcaaggcgccatcctcatgaaaactgtgtaacataataaccgaagtgtcgaaaaggtggcaccttgtccaattgaacacgctcgatgaaaaaaataagatatatataaggttaagtaaagcgtctgttagaaaggaagtttttcctttttcttgctctcttgtcttttcatctactatttccttcgtgtaatacagggtcgtcagatacatagatacaattctattacccccatccatacaatg

SEQ ID NO: 6 - protein, 21 aa, Homo sapiens
MKVSVAALSCLMLVTALGSQA

SEQ ID NO: 7 - protein, 17 aa, Artificial Sequence
  Stanniocalcin signal peptide
MLQNSAVLLLLVISASA

SEQ ID NO: 8 - protein, 24 aa, Homo sapiens
MKWVTFISLLFLFSSAYSRGVFRR

SEQ ID NO: 9 - protein, 18 aa, Homo sapiens
MKWVTFISLLFLFSSAYS

SEQ ID NO: 10 - protein, 18 aa, Homo sapiens
MKWVSFISLLFLFSSAYS

SEQ ID NO: 11 - protein, 19 aa, Homo sapiens
MLLQAFLFLLAGFAAKISA

SEQ ID NO: 12 - protein, 86 aa, Homo sapiens
  MISC_FEATURE (84): Xaa equals any one of Glu or Asp
MRFPSIFTAVLAFAASSALAAPVNTTTEDETAQIPAEAVIGYSDLEGDFDVAVLPFSNSTNNGLLFINTTIASIAAKEEGVSLXKR

SEQ ID NO: 13 - protein, 24 aa, Homo sapiens
MKWVSFISLLFLFSSAYSRSLEKR

SEQ ID NO: 14 - protein, 24 aa, Homo sapiens
MKWVSFISLLFLFSSAYSRSLDKR

SEQ ID NO: 15 - protein, 21 aa, Homo sapiens
MNIFYIFLFLLSFVQGSLDKR

SEQ ID NO: 16 - protein, 19 aa, Homo sapiens
MGWSCIILFLVATATGVHS

SEQ ID NO: 17 - protein, 29 aa, Homo sapiens
MERAAPSRRVPLPLLLLGGLALLAAGVDA

SEQ ID NO: 18 - protein, 22 aa, Homo sapiens
MMKTLLLFVGLLLTWESGQVLG

SEQ ID NO: 19 - protein, 21 aa, Homo sapiens
MLPLCLVAALLLAAGPGPSLG

SEQ ID NO: 20 - protein, 24 aa, Homo sapiens
MKWVSFISLLFLFSSAYSRGVFRR

SEQ ID NO: 21 - protein, 18 aa, Artificial Sequence
  MUTAGEN (14) to (18): Variant of HSA native leader
MKWVTFISLLFLFAGVLG

SEQ ID NO: 22 - protein, 18 aa, Artificial Sequence
  MUTAGEN (14) to (18): Variant of HSA native leader
MKWVTFISLLFLFSGVLG

SEQ ID NO: 23 - protein, 18 aa, Artificial Sequence
  MUTAGEN (14) to (18): Variant of HSA native leader
MKWVTFISLLFLFGGVLG

SEQ ID NO: 24 - protein, 18 aa, Homo sapiens
MKWVTFISLLFLFAGVSG

SEQ ID NO: 25 - protein, 18 aa, Homo sapiens
MKWVTFISLLFLFGGVSG

SEQ ID NO: 26 - protein, 18 aa, Artificial Sequence
  MUTAGEN (14) to (18): Variant of HSA native leader
MKWVTFISLLFLFAGVSG

SEQ ID NO: 27 - protein, 18 aa, Artificial Sequence
  MUTAGEN (14) to (18): Variant of HSA native leader
MKWVTFISLLFLFSGVSG

SEQ ID NO: 28 - protein, 18 aa, Artificial Sequence
  MUTAGEN (14) to (18): Variant of HSA native leader
MKWVTFISLLFLFGGVSG

SEQ ID NO: 29 - protein, 23 aa, Artificial Sequence
  MUTAGEN (14) to (23): Variant of HSA native leader
MKWVTFISLLFLFGGVLGDLHKS

SEQ ID NO: 30 - protein, 22 aa, Artificial Sequence
  Synthetic signal peptide
MPTWAWWLFLVLLLALWAPARG

SEQ ID NO: 31 - protein, 17 aa, Homo sapiens
MFKSVVYSILAASLANA

SEQ ID NO: 32 - protein, 29 aa, Homo sapiens
MNIFYIFLFLLSFVQGLEHTHRRGSLDKR

SEQ ID NO: 33 - protein, 23 aa, Homo sapiens
MKLAYSLLLPLAGVSASVINYKR

SEQ ID NO: 34 - protein, 65 aa, Homo sapiens
MKLKTVRSAVLSSLFASQVLGQPIDDTESQTTSVNLMADDTESAFATQTNSGGLDVVGLISMAKR

SEQ ID NO: 35 - protein, 70 aa, Homo sapiens
MKLKTVRSAVLSSLFASQVLGQPIDDTESQTTSVNLMADDTESAFATQTNSGGLDVVGLISMAEEGEPKR

SEQ ID NO: 36 - DNA, 58 bp, Artificial Sequence
  primer used to generate XhoI and ClaI site in pPPC0006
gcctcgagaaaagagatgcacacaagagtgaggttgctcatcgatttaaagatttggg

SEQ ID NO: 37 - DNA, 59 bp, Artificial Sequence
  primer used in generation XhoI and ClaI site in pPPC0006
aatcgatgagcaacctcactcttgtgtgcatctcttttctcgaggctcctggaataagc

SEQ ID NO: 38 - DNA, 24 bp, Artificial Sequence
  primer used in generation XhoI and ClaI site in pPPC0006
tacaaacttaagagtccaattagc

SEQ ID NO: 39 - DNA, 29 bp, Artificial Sequence
  primer used in generation XhoI and ClaI site in pPPC0006
cacttctctagagtggtttcatatgtctt

SEQ ID NO: 40 - DNA, 60 bp, Artificial Sequence
  Misc_Structure: Synthetic oligonucleotide used to alter restriction sites in pPPC0007
aagctgccttaggcttataataaggcgcgccggccggccgtttaaactaagcttaattct

SEQ ID NO: 41 - DNA, 60 bp, Artificial Sequence
  Misc_Structure: Synthetic oligonucleotide used to alter restriction sites in pPPC0007
agaattaagcttagtttaaacggccggccggcgcgccttattataagcctaaggcagctt

SEQ ID NO: 42 - DNA, 32 bp, Artificial Sequence
  forward primer useful for generation of albumin fusion protein in which the albumin  moiety is N-terminal of the Therapeutic Protein
  misc_feature (18): n equals a,t,g, or c
  misc_feature (19): n equals a,t,g, or c
  misc_feature (20): n equals a,t,g, or c
  misc_feature (21): n equals a,t,g, or c
  misc_feature (22): n equals a,t,g, or c
  misc_feature (23): n equals a,t,g, or c
  misc_feature (24): n equals a,t,g, or c
  misc_feature (25): n equals a,t,g, or c
  misc_feature (26): n equals a,t,g, or c
  misc_feature (27): n equals a,t,g, or c
  misc_feature (28): n equals a,t,g, or c
  misc_feature (29): n equals a,t,g, or c
  misc_feature (30): n equals a,t,g, or c
  misc_feature (31): n equals a,t,g, or c
  misc_feature (32): n equals a,t,g, or c
aagctgccttaggcttannnnnnnnnnnnnnn

SEQ ID NO: 43 - DNA, 51 bp, Artificial Sequence
  reverse primer useful for generation of albumin fusion protein in which the albumin  moiety is N-terminal of the Therapeutic Protein
  misc_feature (37): n equals a,t,g, or c
  misc_feature (38): n equals a,t,g, or c
  misc_feature (39): n equals a,t,g, or c
  misc_feature (40): n equals a,t,g, or c
  misc_feature (41): n equals a,t,g, or c
  misc_feature (42): n equals a,t,g, or c
  misc_feature (43): n equals a,t,g, or c
  misc_feature (44): n equals a,t,g, or c
  misc_feature (45): n equals a,t,g, or c
  misc_feature (46): n equals a,t,g, or c
  misc_feature (47): n equals a,t,g, or c
  misc_feature (48): n equals a,t,g, or c
  misc_feature (49): n equals a,t,g, or c
  misc_feature (50): n equals a,t,g, or c
  misc_feature (51): n equals a,t,g, or c
gcgcgcgtttaaacggccggccggcgcgccttattannnnnnnnnnnnnnn

SEQ ID NO: 44 - protein, 4 aa, Homo sapiens
LDKR

SEQ ID NO: 45 - protein, 4 aa, Homo sapiens
LEKR

SEQ ID NO: 46 - DNA, 33 bp, Artificial Sequence
  forward primer useful for generation of albumin fusion protein in which the albumin  moiety is c-terminal of the Therapeutic Protein
  misc_feature (19): n equals a,t,g, or c
  misc_feature (20): n equals a,t,g, or c
  misc_feature (21): n equals a,t,g, or c
  misc_feature (22): n equals a,t,g, or c
  misc_feature (23): n equals a,t,g, or c
  misc_feature (24): n equals a,t,g, or c
  misc_feature (25): n equals a,t,g, or c
  misc_feature (26): n equals a,t,g, or c
  misc_feature (27): n equals a,t,g, or c
  misc_feature (28): n equals a,t,g, or c
  misc_feature (29): n equals a,t,g, or c
  misc_feature (30): n equals a,t,g, or c
  misc_feature (31): n equals a,t,g, or c
  misc_feature (32): n equals a,t,g, or c
  misc_feature (33): n equals a,t,g, or c
aggagcgtcgacaaaagannnnnnnnnnnnnnn

SEQ ID NO: 47 - DNA, 52 bp, Artificial Sequence
  reverse primer useful for generation of albumin fusion protein in which the albumin  moiety is c-terminal of the Therapeutic Protein
  misc_feature (38): n equals a,t,g, or c
  misc_feature (39): n equals a,t,g, or c
  misc_feature (40): n equals a,t,g, or c
  misc_feature (41): n equals a,t,g, or c
  misc_feature (42): n equals a,t,g, or c
  misc_feature (43): n equals a,t,g, or c
  misc_feature (44): n equals a,t,g, or c
  misc_feature (45): n equals a,t,g, or c
  misc_feature (46): n equals a,t,g, or c
  misc_feature (47): n equals a,t,g, or c
  misc_feature (48): n equals a,t,g, or c
  misc_feature (49): n equals a,t,g, or c
  misc_feature (50): n equals a,t,g, or c
  misc_feature (51): n equals a,t,g, or c
  misc_feature (52): n equals a,t,g, or c
ctttaaatcgatgagcaacctcactcttgtgtgcatcnnnnnnnnnnnnnnn

SEQ ID NO: 48 - protein, 9 aa, Homo sapiens
DAHKSEVAH

SEQ ID NO: 49 - DNA, 11 bp, Artificial Sequence
  misc_feature (1) to (11): Kozak sequence
ccgccaccatg

SEQ ID NO: 50 - DNA, 46 bp, Artificial Sequence
  forward primer useful for inserting Therapeutic protein into pC4:HSA vector
  misc_feature (29): n equals a,t,g, or c
  misc_feature (30): n equals a,t,g, or c
  misc_feature (31): n equals a,t,g, or c
  misc_feature (32): n equals a,t,g, or c
  misc_feature (33): n equals a,t,g, or c
  misc_feature (34): n equals a,t,g, or c
  misc_feature (35): n equals a,t,g, or c
  misc_feature (36): n equals a,t,g, or c
  misc_feature (37): n equals a,t,g, or c
  misc_feature (38): n equals a,t,g, or c
  misc_feature (39): n equals a,t,g, or c
  misc_feature (40): n equals a,t,g, or c
  misc_feature (41): n equals a,t,g, or c
  misc_feature (42): n equals a,t,g, or c
  misc_feature (43): n equals a,t,g, or c
  misc_feature (44): n equals a,t,g, or c
  misc_feature (45): n equals a,t,g, or c
  misc_feature (46): n equals a,t,g, or c
ccgccgctcgaggggtgtgtttcgtcgannnnnnnnnnnnnnnnnn

SEQ ID NO: 51 - DNA, 55 bp, Artificial Sequence
  reverse primer useful for inserting Therapeutic protein into pC4:HSA vector
  misc_feature (38): n equals a,t,g, or c
  misc_feature (39): n equals a,t,g, or c
  misc_feature (40): n equals a,t,g, or c
  misc_feature (41): n equals a,t,g, or c
  misc_feature (42): n equals a,t,g, or c
  misc_feature (43): n equals a,t,g, or c
  misc_feature (44): n equals a,t,g, or c
  misc_feature (45): n equals a,t,g, or c
  misc_feature (46): n equals a,t,g, or c
  misc_feature (47): n equals a,t,g, or c
  misc_feature (48): n equals a,t,g, or c
  misc_feature (49): n equals a,t,g, or c
  misc_feature (50): n equals a,t,g, or c
  misc_feature (51): n equals a,t,g, or c
  misc_feature (52): n equals a,t,g, or c
  misc_feature (53): n equals a,t,g, or c
  misc_feature (54): n equals a,t,g, or c
  misc_feature (55): n equals a,t,g, or c
agtcccatcgatgagcaacctcactcttgtgtgcatcnnnnnnnnnnnnnnnnnn

SEQ ID NO: 52 - DNA, 733 bp, Homo sapiens
gggatccggagcccaaatcttctgacaaaactcacacatgcccaccgtgcccagcacctgaattcgagggtgcaccgtcagtcttcctcttccccccaaaacccaaggacaccctcatgatctcccggactcctgaggtcacatgcgtggtggtggacgtaagccacgaagaccctgaggtcaagttcaactggtacgtggacggcgtggaggtgcataatgccaagacaaagccgcgggaggagcagtacaacagcacgtaccgtgtggtcagcgtcctcaccgtcctgcaccaggactggctgaatggcaaggagtacaagtgcaaggtctccaacaaagccctcccaacccccatcgagaaaaccatctccaaagccaaagggcagccccgagaaccacaggtgtacaccctgcccccatcccgggatgagctgaccaagaaccaggtcagcctgacctgcctggtcaaaggcttctatccaagcgacatcgccgtggagtgggagagcaatgggcagccggagaacaactacaagaccacgcctcccgtgctggactccgacggctccttcttcctctacagcaagctcaccgtggacaagagcaggtggcagcaggggaacgtcttctcatgctccgtgatgcatgaggctctgcacaaccactacacgcagaagagcctctccctgtctccgggtaaatgagtgcgacggccgcgactctagaggat

SEQ ID NO: 53 - protein, 5 aa, Homo sapiens
  MISC_FEATURE (3): Xaa equals any of the twenty naturally ocurring L-amino acids
WSXWS

SEQ ID NO: 54 - DNA, 86 bp, Artificial Sequence
  Synthetic sequence with 4 tandem copies of the GAS binding site found in the IRF1 promoter (Rothman et al., Immunity 1:457-468 (1994)), 18 nucleotides complementary to the SV40 early promoter, and a Xho I restriction site.
gcgcctcgagatttccccgaaatctagatttccccgaaatgatttccccgaaatgatttccccgaaatatctgccatctcaattag

SEQ ID NO: 55 - DNA, 27 bp, Artificial Sequence
  Synthetic sequence complementary to the SV40 promter; includes a Hind III restriction site.
gcggcaagctttttgcaaagcctaggc

SEQ ID NO: 56 - DNA, 271 bp, Artificial Sequence
  Protein_Bind: Synthetic promoter for use in biological assays; includes GAS binding sites found in the IRF1 promoter
ctcgagatttccccgaaatctagatttccccgaaatgatttccccgaaatgatttccccgaaatatctgccatctcaattagtcagcaaccatagtcccgcccctaactccgcccatcccgcccctaactccgcccagttccgcccattctccgccccatggctgactaattttttttatttatgcagaggccgaggccgcctcggcctctgagctattccagaagtagtgaggaggcttttttggaggcctaggcttttgcaaaaagctt

SEQ ID NO: 57 - DNA, 32 bp, Artificial Sequence
  Synthetic primer complementary to human genomic EGR-1 promoter sequence; includes a Xho I restriction site.
gcgctcgagggatgacagcgatagaaccccgg

SEQ ID NO: 58 - DNA, 31 bp, Artificial Sequence
  Synthetic primer complementary to human genomic EGR-1 promoter sequence; includes a Hind III restriction site.
gcgaagcttcgcgactccccggatccgcctc

SEQ ID NO: 59 - DNA, 12 bp, Homo sapiens
ggggactttccc

SEQ ID NO: 60 - DNA, 73 bp, Artificial Sequence
  Synthetic primer with 4 tandem copies of the NF-KB binding site (GGGGACTTTCCC), 18 nucleotides complementary to the 5' end of the SV40 early promoter sequence, and a XhoI restriction site.
gcggcctcgaggggactttcccggggactttccggggactttccgggactttccatcctgccatctcaattag

SEQ ID NO: 61 - DNA, 256 bp, Artificial Sequence
  Protein_Bind: Synthetic promoter for use in biological assays; includes NF-KB binding sites.
ctcgaggggactttcccggggactttccggggactttccgggactttccatctgccatctcaattagtcagcaaccatagtcccgcccctaactccgcccatcccgcccctaactccgcccagttccgcccattctccgccccatggctgactaattttttttatttatgcagaggccgaggccgcctcggcctctgagctattccagaagtagtgaggaggcttttttggaggcctaggcttttgcaaaaagctt

SEQ ID NO: 62 - DNA, 23 bp, Artificial Sequence
  Degenerate VH forward primer useful for amplifying human VH domains
caggtgcagctggtgcagtctgg

SEQ ID NO: 63 - DNA, 23 bp, Artificial Sequence
  Degenerate VH forward primer useful for amplifying human VH domains
caggtcaacttaagggagtctgg

SEQ ID NO: 64 - DNA, 23 bp, Artificial Sequence
  Degenerate VH forward primer useful for amplifying human VH domains
gaggtgcagctggtggagtctgg

SEQ ID NO: 65 - DNA, 23 bp, Artificial Sequence
  Degenerate VH forward primer useful for amplifying human VH domains
caggtgcagctgcaggagtcggg

SEQ ID NO: 66 - DNA, 23 bp, Artificial Sequence
  Degenerate VH forward primer useful for amplifying human VH domains
gaggtgcagctgttgcagtctgc

SEQ ID NO: 67 - DNA, 23 bp, Artificial Sequence
  Degenerate VH forward primer useful for amplifying human VH domains
caggtacagctgcagcagtcagg

SEQ ID NO: 68 - DNA, 24 bp, Artificial Sequence
  Degenerate JH reverse primer useful for amplifying human VH domains
tgaggagacggtgaccagggtgcc

SEQ ID NO: 69 - DNA, 24 bp, Artificial Sequence
  Degenerate JH reverse primer useful for amplifying human VH domains
tgaagagacggtgaccattgtccc

SEQ ID NO: 70 - DNA, 24 bp, Artificial Sequence
  Degenerate JH reverse primer useful for amplifying human VH domains
tgaggagacggtgaccagggttcc

SEQ ID NO: 71 - DNA, 24 bp, Artificial Sequence
  Degenerate JH reverse primer useful for amplifying human VH domains
tgaggagacggtgaccgtggtccc

SEQ ID NO: 72 - DNA, 23 bp, Artificial Sequence
  Degenerate Vkappa forward primer useful for amplifying human VL domains
gacatccagatgacccagtctcc

SEQ ID NO: 73 - DNA, 23 bp, Artificial Sequence
  Degenerate Vkappa forward primer useful for amplifying human VL domains
gatgttgtgatgactcagtctcc

SEQ ID NO: 74 - DNA, 23 bp, Artificial Sequence
  Degenerate Vkappa forward primer useful for amplifying human VL domains
gatattgtgatgactcagtctcc

SEQ ID NO: 75 - DNA, 23 bp, Artificial Sequence
  Degenerate Vkappa forward primer useful for amplifying human VL domains
gaaattgtgttgacgcagtctcc

SEQ ID NO: 76 - DNA, 23 bp, Artificial Sequence
  Degenerate Vkappa forward primer useful for amplifying human VL domains
gacatcgtgatgacccagtctcc

SEQ ID NO: 77 - DNA, 23 bp, Artificial Sequence
  Degenerate Vkappa forward primer useful for amplifying human VL domains
gaaacgacactcacgcagtctcc

SEQ ID NO: 78 - DNA, 23 bp, Artificial Sequence
  Degenerate Vkappa forward primer useful for amplifying human VL domains
gaaattgtgctgactcagtctcc

SEQ ID NO: 79 - DNA, 23 bp, Artificial Sequence
  Degenerate Vlambda forward primer useful for amplifying human VL domains
cagtctgtgttgacgcagccgcc

SEQ ID NO: 80 - DNA, 23 bp, Artificial Sequence
  Degenerate Vlambda forward primer useful for amplifying human VL domains
cagtctgccctgactcagcctgc

SEQ ID NO: 81 - DNA, 23 bp, Artificial Sequence
  Degenerate Vlambda forward primer useful for amplifying human VL domains
tcctatgtgctgactcagccacc

SEQ ID NO: 82 - DNA, 23 bp, Artificial Sequence
  Degenerate Vlambda forward primer useful for amplifying human VL domains
tcttctgagctgactcaggaccc

SEQ ID NO: 83 - DNA, 23 bp, Artificial Sequence
  Degenerate Vlambda forward primer useful for amplifying human VL domains
cacgttatactgactcaaccgcc

SEQ ID NO: 84 - DNA, 23 bp, Artificial Sequence
  Degenerate Vlambda forward primer useful for amplifying human VL domains
caggctgtgctcactcagccgtc

SEQ ID NO: 85 - DNA, 23 bp, Artificial Sequence
  Degenerate Vlambda forward primer useful for amplifying human VL domains
aattttatgctgactcagcccca

SEQ ID NO: 86 - DNA, 24 bp, Artificial Sequence
  Degenerate Jkappa reverse primer useful for amplifying human VL domains
acgtttgatttccaccttggtccc

SEQ ID NO: 87 - DNA, 24 bp, Artificial Sequence
  Degenerate Jkappa reverse primer useful for amplifying human VL domains
acgtttgatctccagcttggtccc

SEQ ID NO: 88 - DNA, 24 bp, Artificial Sequence
  Degenerate Jkappa reverse primer useful for amplifying human VL domains
acgtttgatatccactttggtccc

SEQ ID NO: 89 - DNA, 24 bp, Artificial Sequence
  Degenerate Jkappa reverse primer useful for amplifying human VL domains
acgtttgatctccaccttggtccc

SEQ ID NO: 90 - DNA, 24 bp, Artificial Sequence
  Degenerate Jkappa reverse primer useful for amplifying human VL domains
acgtttaatctccagtcgtgtccc

SEQ ID NO: 91 - DNA, 23 bp, Artificial Sequence
  Degenerate Jlambda reverse primer useful for amplifying human VL domains
cagtctgtgttgacgcagccgcc

SEQ ID NO: 92 - DNA, 23 bp, Artificial Sequence
  Degenerate Jlambda reverse primer useful for amplifying human VL domains
cagtctgccctgactcagcctgc

SEQ ID NO: 93 - DNA, 23 bp, Artificial Sequence
  Degenerate Jlambda reverse primer useful for amplifying human VL domains
tcctatgtgctgactcagccacc

SEQ ID NO: 94 - DNA, 23 bp, Artificial Sequence
  Degenerate Jlambda reverse primer useful for amplifying human VL domains
tcttctgagctgactcaggaccc

SEQ ID NO: 95 - DNA, 23 bp, Artificial Sequence
  Degenerate Jlambda reverse primer useful for amplifying human VL domains
cacgttatactgactcaaccgcc

SEQ ID NO: 96 - DNA, 23 bp, Artificial Sequence
  Degenerate Jlambda reverse primer useful for amplifying human VL domains
caggctgtgctcactcagccgtc

SEQ ID NO: 97 - DNA, 23 bp, Artificial Sequence
  Degenerate Jlambda reverse primer useful for amplifying human VL domains
aattttatgctgactcagcccca

SEQ ID NO: 98 - protein, 5 aa, Homo sapiens
CDLPQ

SEQ ID NO: 99 - protein, 165 aa, Homo sapiens
  MISC_FEATURE (23): Xaa equals Arg or Lys
  MISC_FEATURE (113): Xaa equals Ala or Val
CDLPQTHSLGSRRTLMLLAQMRXISLFSCLKDRHDFGFPQEEFGNQFQKAETIPVLHEMIQQIFNLFTTKDSSAAWDEDLLDKFCTELYQQLNDLEACVMQEERVGETPLMNXDSILAVKKYFRRITLYLTEKKYSPCAWEVVRAEIMRSLSLSTNLQERLRRKE

SEQ ID NO: 100 - protein, 165 aa, Homo sapiens
  MISC_FEATURE (23): Xaa equals Arg or Lys
  MISC_FEATURE (113): Xaa equals Ala or Val
CDLPQTHSLGSRRTLMLLAQMRXISLFSCLKDRHDFGFPQEEFGNQFQKAETIPVLHEMIQQIFNLFSTKDSSAAWDETLLDKFYTELYQQLNDLEACVMQEERVGETPLMNXDSILAVKKYFRRITLYLTEKKYSPCAWEVVRAEIMRSLSLSTNLQERLRRKE

SEQ ID NO: 101 - protein, 165 aa, Homo sapiens
  MISC_FEATURE (23): Xaa equals Arg or Lys
CDLPQTHSLGSRRTLMLLAQMRXISLFSCLKDRHDFGFPQEEFGNQFQKAETIPVLHEMIQQIFNLFSTKDSSAAWDETLLDKFYTELYQQLNDMEACVIQEVGVEETPLMNVDSILAVKKYFQRITLYLTEKKYSPCAWEVVRAEIMRSFSLSKIFQERLRRKE

SEQ ID NO: 102 - protein, 165 aa, Homo sapiens
  MISC_FEATURE (23): Xaa equals Arg or Lys
  MISC_FEATURE (97): Xaa equals Ser or Val
  MISC_FEATURE (98): Xaa equals Cys or Leu
  MISC_FEATURE (99): Xaa equals Val or Cys
  MISC_FEATURE (100): Xaa equals Met or Asp
CDLPQTHSLGSRRTLMLLAQMRXISLFSCLKDRHDFGFPQEEFGNQFQKAETIPVLHEMIQQIFNLFSTKDSSAAWDETLLDKFYTELYQQLNDLEXXXXQEVGVIESPLMYEDSILAVRKYFQRITLYLTEKKYSSCAWEVVRAEIMRSFSLSINLQKRLKSKE

SEQ ID NO: 103 - protein, 167 aa, Homo sapiens
  MISC_FEATURE (115): Xaa equals Ala or Val
MSYNLLGFLQRSSNFQCQKLLWQLNGRLEYCLKDRMNFDIPEEIKQLQQFQKEDAALTIYEMLQNIFAIFRQDSSAAWDEDLLDKFCTELYQQLNDLEACVMQEERVGETPLMNXDSILAVKKYFRRITLYLTEKKYSPCAWEVVRAEIMRSLSLSTNLQERLRRKE

SEQ ID NO: 104 - protein, 166 aa, Homo sapiens
MCDLPETHSLDNRRTLMLLAQMSRISPSSCLMDRHDFGFPQEEFDGNQFQKAPAISVLHELIQQIFNLFTTKDSSSTGWNETIVENLLANVYHQINHLKTVLEEKLEKEDFTRGKLMSSLHLKRYYGRILHYLKAKEYSHCAWTIVRVEILRNFYFINRLTGYLRN

SEQ ID NO: 105 - protein, 23 aa, Artificial Sequence
  Synthetic signal peptide
MRPTWAWWLFLVLLLALWAPARG

SEQ ID NO: 106 - skipped
  primer (deleted)

SEQ ID NO: 107 - DNA, 106 bp, Artificial sequence
  primer for full-length IFNb amplification, has BamHI cloning site
gcgcggatccgaattccgccgccatgaccaacaagtgtctcctccaaattgctctcctgttgtgcttctccactacagctctttccatgagctacaacttgcttgg

SEQ ID NO: 108 - DNA, 55 bp, Artificial sequence
  primer for full-length IFNb amplification, has ClaI cloning site
gcgcgcatcgatgagcaacctcactcttgtgtgcatcgtttcggaggtaacctgt

SEQ ID NO: 109 - DNA, 41 bp, Homo sapiens
cgcgcgcgtcgacaaaagatgtgatctgcctcaaacccaca

SEQ ID NO: 110 - DNA, 59 bp, Homo sapiens
gcgcgcatcgatgagcaacctcactcttgtgtgcatcttccttacttcttaaactttct

SEQ ID NO: 111 - protein, 21 aa, Homo sapiens
MWWRLWWLLLLLLLLWPMVWA

SEQ ID NO: 112 - protein, 24 aa, Homo sapiens
MKWVSFISLLFLFSSAYSGSLDKR

SEQ ID NO: 113 - DNA, 1497 bp, Hypocrea jecorina
tctagagttgtgaagtcggtaatcccgctgtatagtaatacgagtcgcatctaaatactccgaagctgctgcgaacccggagaatcgagatgtgctggaaagcttctagcgagcggctaaattagcatgaaaggctatgagaaattctggagacggcttgttgaatcatggcgttccattcttcgacaagcaaagcgttccgtcgcagtagcaggcactcattcccgaaaaaactcggagattcctaagtagcgatggaaccggaataatataataggcaatacattgagttgcctcgacggttgcaatgcaggggtactgagcttggacataactgttccgtaccccacctcttctcaacctttggcgtttccctgattcagcgtacccgtacaagtcgtaatcactattaacccagactgaccggacgtgttttgcccttcatttggagaaataatgtcattgcgatgtgtaatttgcctgcttgaccgactggggctgttcgaagcccgaatgtaggattgttatccgaactctgctcgtagaggcatgttgtgaatctgtgtcgggcaggacacgcctcgaaggttcacggcaagggaaaccaccgatagcagtgtctagtagcaacctgtaaagccgcaatgcagcatcactggaaaatacaaaccaatggctaaaagtacataagttaatgcctaaagaagtcatataccagcggctaataattgtacaatcaagtggctaaacgtaccgtaatttgccaacggcttgtggggttgcagaagcaacggcaaagccccacttccccacgtttgtttcttcactcagtccaatctcagctggtgatcccccaattgggtcgcttgtttgttccggtgaagtgaaagaagacagaggtaagaatgtctgactcggagcgttttgcatacaaccaagggcagtgatggaagacagtgaaatgttgacattcaaggagtatttagccagggatgcttgagtgtatcgtgtaaggaggtttgtctgccgatacgacgaatactgtatagtcacttctggtgaagtggtccatattgaaatgtaagtcggcactgaacaggcaaaagattgagttgaaactgcctaagatctcgggccctcgggccttcggcctttgggtgtacatgtttgtgctccgggcaaatgcaaagtgtggtaggatcgaacacactgctgcctttaccaagcagctgagggtatgtgataggcaaatgttcaggggccactgcatggtttcgaatagaaagagaagcttagccaagaacaatagccgataaagatagcctcattaaacggaatgagctagtaggcaaagtcagcgaatgtgtatatataaaggttcgaggtccgtgcctccctcatgctctccccatctactcatcaactcagatcctccaggagacttgtacaccatcttttgaggcacagaaacccaatagtcaaccgcggactggcatc

SEQ ID NO: 114 - DNA, 366 bp, Aspergillus nidulans
agatctggttcctgagtacatctaccgatgcgcctcgatccccctcttagccgcatgagattcctaccatttatgtcctatcgttcagggtcctatttggaccgctagaaatagactctgctcgatttgtttccattattcacgcaattacgatagtatttggctcttttcgtttggcccaggtcaattcgggtaagacgcgatcacgccattgtggccgccggcgttgtgctgctgctattccccgcatataaacaacccctccaccagttcgttgggctttgcgaatgctgtactctatttcaagttgtcaaaagagaggattcaaaaaattataccccagatatcaaagatatcaaagccatc

SEQ ID NO: 115 - DNA, 1646 bp, Hypocrea jecorina
tctagagttgtgaagtcggtaatcccgctgtatagtaatacgagtcgcatctaaatactccgaagctgctgcgaacccggagaatcgagatgtgctggaaagcttctagcgagcggctaaattagcatgaaaggctatgagaaattctggagacggcttgttgaatcatggcgttccattcttcgacaagcaaagcgttccgtcgcagtagcaggcactcattcccgaaaaaactcggagattcctaagtagcgatggaaccggaataatataataggcaatacattgagttgcctcgacggttgcaatgcaggggtactgagcttggacataactgttccgtaccccacctcttctcaacctttggcgtttccctgattcagcgtacccgtacaagtcgtaatcactattaacccagactgaccggacgtgttttgcccttcatttggagaaataatgtcattgcgatgtgtaatttgcctgcttgaccgactggggctgttcgaagcccgaatgtaggattgttatccgaactctgctcgtagaggcatgttgtgaatctgtgtcgggcaggacacgcctcgaaggttcacggcaagggaaaccaccgatagcagtgtctagtagcaacctgtaaagccgcaatgcagcatcactggaaaatacaaaccaatggctaaaagtacataagttaatgcctaaagaagtcatataccagcggctaataattgtacaatcaagtggctaaacgtaccgtaatttgccaacggcttgtggggttgcagaagcaacggcaaagccccacttccccacgtttgtttcttcactcagtccaatctcagctggtgatcccccaattgggtcgcttgtttgttccggtgaagtgaaagaagacagaggtaagaatgtctgactcggagcgttttgcatacaaccaagggcagtgatggaagacagtgaaatgttgacattcaaggagtatttagccagggatgcttgagtgtatcgtgtaaggaggtttgtctgccgatacgacgaatactgtatagtcacttctggtgaagtggtccatattgaaatgtaagtcggcactgaacaggcaaaagattgagttgaaactgcctaagatctcgggccctcgggccttcggcctttgggtgtacatgtttgtgctccgggcaaatgcaaagtgtggtaggatcgaacacactgctgcctttaccaagcagctgagggtatgtgataggcaaatgttcaggggccactgcatggtttcgaatagaaagagaagcttagcctgcagcctcttatcgagaaagaaattaccgtcgctcgtgatttgtttgcaaaaagaacaaaactgaaaaaacccagacacgctcgacttcctgtcttcctattgattgcagcttccaatttcgtcacacaacaaggtcctagcttagccaagaacaatagccgataaagatagcctcattaaacggaatgagctagtaggcaaagtcagcgaatgtgtatatataaaggttcgaggtccgtgcctccctcatgctctccccatctactcatcaactcagatcctccaggagacttgtacaccatcttttgaggcacagaaacccaatagtcaaccgcggactggcatc

SEQ ID NO: 116 - DNA, 516 bp, Aspergillus nidulans
agatctggttcctgagtacatctaccgatgcgcctcgatccccctcttagccgcatgagattcctaccatttatgtcctatcgttcagggtcctatttggaccgctagaaatagactctgctcgatttgtttccattattcacgcaattacgatagtatttggctcttttcgtttggcccaggtcaattcgggtaagacgcgatcacgccattgtggccgccggcgctgcagcctcttatcgagaaagaaattaccgtcgctcgtgatttgtttgcaaaaagaacaaaactgaaaaaacccagacacgctcgacttcctgtcttcctattgattgcagcttccaatttcgtcacacaacaaggtcctacgccggcgttgtgctgctgctattccccgcatataaacaacccctccaccagttcgttgggctttgcgaatgctgtactctatttcaagttgtcaaaagagaggattcaaaaaattataccccagatatcaaagatatcaaagccatc

SEQ ID NO: 117 - DNA, 495 bp, Homo sapiens
tgtgatctgcctcaaacccacagcctgggttctagaaggaccttgatgctcctggcacagatgaggagaatctctcttttctcctgcttgaaggacagacatgactttggatttccccaggaggagtttggcaaccagttccaaaaggctgaaaccatccctgtcctccatgagatgatccagcagatcttcaatctcttcagcacaaaggactcatctgctgcttgggatgagaccctcctagacaaattctacactgaactctaccagcagctgaatgacctggaagcctgtgtgatacagggggtgggggtgacagagactcccctgatgaaggaggactccattctggctgtgaggaaatacttccaaagaatcactctctatctgaaagagaagaaatacagcccttgtgcctgggaggttgtcagagcagaaatcatgagatctttttctttgtcaacaaacttgcaagaaagtttaagaagtaaggaa

SEQ ID NO: 118 - DNA, 495 bp, Homo sapiens; identical to SEQ ID NO: 117

SEQ ID NO: 119 - DNA, 495 bp, Homo sapiens; identical to SEQ ID NO: 117

SEQ ID NO: 120 - DNA, 498 bp, Homo sapiens
tgtgatctgcctcaaacccacagcctgggttctagaaggaccttgatgctcctggcacagatgaggagaatctctcttttctcctgcttgaaggacagacatgactttggatttccccaggaggagtttggcaaccagttccaaaaggctgaaaccatccctgtcctccatgagatgatccagcagatcttcaatctcttcagcacaaaggactcatctgctgcttgggatgagaccctcctagacaaattctacactgaactctaccagcagctgaatgacctggaagcctgtgtgatacagggggtgggggtgacagagactcccctgatgaaggaggactccattctggctgtgaggaaatacttccaaagaatcactctctatctgaaagagaagaaatacagcccttgtgcctgggaggttgtcagagcagaaatcatgagatctttttctttgtcaacaaacttgcaagaaagtttaagaagtaaggaataa

SEQ ID NO: 121 - DNA, 495 bp, Homo sapiens; identical to SEQ ID NO: 117

SEQ ID NO: 122 - DNA, 495 bp, Homo sapiens; identical to SEQ ID NO: 117

SEQ ID NO: 123 - DNA, 495 bp, Homo sapiens; identical to SEQ ID NO: 117

SEQ ID NO: 124 - DNA, 495 bp, Homo sapiens; identical to SEQ ID NO: 117

SEQ ID NO: 125 - DNA, 495 bp, Homo sapiens; identical to SEQ ID NO: 117

SEQ ID NO: 126 - DNA, 495 bp, Homo sapiens; identical to SEQ ID NO: 117

SEQ ID NO: 127 - DNA, 2325 bp, Homo sapiens
atgaagtgggtaagctttatttcccttctttttctctttagctcggcttattccggttctttggataagagagatgcacacaagagtgaggttgctcatcgatttaaagatttgggagaagaaaatttcaaagccttggtgttgattgcctttgctcagtatcttcagcagtgtccatttgaagatcatgtaaaattagtgaatgaagtaactgaatttgcaaaaacatgtgttgctgatgagtcagctgaaaattgtgacaaatcacttcataccctttttggagacaaattatgcacagttgcaactcttcgtgaaacctatggtgaaatggctgactgctgtgcaaaacaagaacctgagagaaatgaatgcttcttgcaacacaaagatgacaacccaaacctcccccgattggtgagaccagaggttgatgtgatgtgcactgcttttcatgacaatgaagagacatttttgaaaaaatacttatatgaaattgccagaagacatccttacttttatgccccggaactccttttctttgctaaaaggtataaagctgcttttacagaatgttgccaagctgctgataaagctgcctgcctgttgccaaagctcgatgaacttcgggatgaagggaaggcttcgtctgccaaacagagactcaagtgtgccagtctccaaaaatttggagaaagagctttcaaagcatgggcagtagctcgcctgagccagagatttcccaaagctgagtttgcagaagtttccaagttagtgacagatcttaccaaagtccacacggaatgctgccatggagatctgcttgaatgtgctgatgacagggcggaccttgccaagtatatctgtgaaaatcaagattcgatctccagtaaactgaaggaatgctgtgaaaaacctctgttggaaaaatcccactgcattgccgaagtggaaaatgatgagatgcctgctgacttgccttcattagctgctgattttgttgaaagtaaggatgtttgcaaaaactatgctgaggcaaaggatgtcttcctgggcatgtttttgtatgaatatgcaagaaggcatcctgattactctgtcgtgctgctgctgagacttgccaagacatatgaaaccactctagagaagtgctgtgccgctgcagatcctcatgaatgctatgccaaagtgttcgatgaatttaaacctcttgtggaagagcctcagaatttaatcaaacaaaattgtgagctttttgagcagcttggagagtacaaattccagaatgcgctattagttcgttacaccaagaaagtaccccaagtgtcaactccaactcttgtagaggtctcaagaaacctaggaaaagtgggcagcaaatgttgtaaacatcctgaagcaaaaagaatgccctgtgcagaagactatctatccgtggtcctgaaccagttatgtgtgttgcatgagaaaacgccagtaagtgacagagtcaccaaatgctgcacagaatccttggtgaacaggcgaccatgcttttcagctctggaagtcgatgaaacatacgtycccaaagagtttaatgctgaaacattcaccttccatgcagatatatgcacactttctgagaaggagagacaaatcaagaaacaaactgcacttgttgagctcgtgaaacacaagcccaaggcaacaaaagagcaactgaaagctgttatggatgatttcgcagcttttgtagagaagtgctgcaaggctgacgataaggagacctgctttgccgaggagggtaaaaaacttgttgctgcaagtcaagctgccttaggcttatgtgatctgcctcaaacccacagcctgggttctagaaggaccttgatgctcctggcacagatgaggagaatctctcttttctcctgcttgaaggacagacatgactttggatttccccaggaggagtttggcaaccagttccaaaaggctgaaaccatccctgtcctccatgagatgatccagcagatcttcaatctcttcagcacaaaggactcatctgctgcttgggatgagaccctcctagacaaattctacactgaactctaccagcagctgaatgacctggaagcctgtgtgatacagggggtgggggtgacagagactcccctgatgaaggaggactccattctggctgtgaggaaatacttccaaagaatcactctctatctgaaagagaagaaatacagcccttgtgcctgggaggttgtcagagcagaaatcatgagatctttttctttgtcaacaaacttgcaagaaagtttaagaagtaaggaataa

SEQ ID NO: 128 - DNA, 96 bp, Homo sapiens
agccccaagatggtgcaagggtctggctgctttgggaggaagatggaccggatcagctcctccagtggcctgggctgcaaagtgctgaggcggcat

SEQ ID NO: 129 - DNA, 96 bp, Homo sapiens; identical to SEQ ID NO: 128

SEQ ID NO: 130 - DNA, 87 bp, Homo sapiens
agccccaagatggtgcaagggtctggctgctttgggaggaagatggaccggatcagctcctccagtggcctgggctgcaaagtgctg

SEQ ID NO: 131 - DNA, 96 bp, Homo sapiens; identical to SEQ ID NO: 128

SEQ ID NO: 132 - DNA, 96 bp, Homo sapiens; identical to SEQ ID NO: 128

SEQ ID NO: 133 - DNA, 96 bp, Homo sapiens; identical to SEQ ID NO: 128

SEQ ID NO: 134 - DNA, 96 bp, Homo sapiens; identical to SEQ ID NO: 128

SEQ ID NO: 135 - DNA, 96 bp, Homo sapiens
agccccaagatggtgcaagggtctggctgctttgggggtaagatggaccggatcagctcctccagtggcctgggctgcaaagtgctgaggcggcat

SEQ ID NO: 136 - DNA, 1716 bp, Homo sapiens
atgtggtggcgcctgtggtggctgctgctgctgctgctgctgctgtggcccatggtgtgggccagccccaagatggtgcaagggtctggctgctttgggaggaagatggaccggatcagctcctccagtggcctgggctgcaaagtgctgtcacttcataccctttttggagacaaattatgcacagttgcaactcttcgtgaaacctatggtgaaatggctgactgctgtgcaaaacaagaacctgagagaaatgaatgcttcttgcaacacaaagatgacaacccaaacctcccccgattggtgagaccagaggttgatgtgatgtgcactgcttttcatgacaatgaagagacatttttgaaaaaatacttatatgaaattgccagaagacatccttacttttatgccccggaactccttttctttgctaaaaggtataaagctgcttttacagaatgttgccaagctgctgataaagctgcctgcctgttgccaaagctcgatgaacttcgggatgaagggaaggcttcgtctgccaaacagagactcaagtgtgccagtctccaaaaatttggagaaagagctttcaaagcatgggcagtagctcgcctgagccagagatttcccaaagctgagtttgcagaagtttccaagttagtgacagatcttaccaaagtccacacggaatgctgccatggagatctgcttgaatgtgctgatgacagggcggaccttgccaagtatatctgtgaaaatcaagattcgatctccagtaaactgaaggaatgctgtgaaaaacctctgttggaaaaatcccactgcattgccgaagtggaaaatgatgagatgcctgctgacttgccttcattagctgctgattttgttgaaagtaaggatgtttgcaaaaactatgctgaggcaaaggatgtcttcctgggcatgtttttgtatgaatatgcaagaaggcatcctgattactctgtcgtgctgctgctgagacttgccaagacatatgaaaccactctagagaagtgctgtgccgctgcagatcctcatgaatgctatgccaaagtgttcgatgaatttaaacctcttgtggaagagcctcagaatttaatcaaacaaaattgtgagctttttgagcagcttggagagtacaaattccagaatgcgctattagttcgttacaccaagaaagtaccccaagtgtcaactccaactcttgtagaggtctcaagaaacctaggaaaagtgggcagcaaatgttgtaaacatcctgaagcaaaaagaatgccctgtgcagaagactatctatccgtggtcctgaaccagttatgtgtgttgcatgagaaaacgccagtaagtgacagagtcaccaaatgctgcacagaatccttggtgaacaggcgaccatgcttttcagctctggaagtcgatgaaacatacgttcccaaagagtttaatgctgaaacattcaccttccatgcagatatatgcacactttctgagaaggagagacaaatcaagaaacaaactgcacttgttgagctcgtgaaacacaagcccaaggcaacaaaagagcaactgaaagctgttatggatgatttcgcagcttttgtagagaagtgctgcaaggctgacgataaggagacctgctttgccgaggagggtaaaaaacttgttgctgcaagtcaagctgccttaggcttataa

SEQ ID NO: 137 - DNA, 96 bp, Homo sapiens
agccccaagatggtgcaagggtctggctgctttgggggcaagatggaccggatcagctcctccagtggcctgggctgcaaagtgctgaggcggcat

SEQ ID NO: 138 - DNA, 96 bp, Homo sapiens
agccccaagatggtgcaagggtctggctgctttgggaggggcatggaccggatcagctcctccagtggcctgggctgcaaagtgctgaggcggcat

SEQ ID NO: 139 - DNA, 96 bp, Homo sapiens; identical to SEQ ID NO: 128

SEQ ID NO: 140 - DNA, 1929 bp, Homo sapiens
atgaagtgggtaagctttatttcccttctttttctctttagctcggcttattccaggagcctcgacaaaagaagccccaagatggtgcaagggtctggctgctttgggaggaagatggaccggatcagctcctccagtggcctgggctgcaaagtgctgaggggtggtggtgatgcacacaagagtgaggttgctcatcgatttaaagatttgggagaagaaaatttcaaagccttggtgttgattgcctttgctcagtatcttcagcagtgtccatttgaagatcatgtaaaattagtgaatgaagtaactgaatttgcaaaaacatgtgttgctgatgagtcagctgaaaattgtgacaaatcacttcataccctttttggagacaaattatgcacagttgcaactcttcgtgaaacctatggtgaaatggctgactgctgtgcaaaacaagaacctgagagaaatgaatgcttcttgcaacacaaagatgacaacccaaacctcccccgattggtgagaccagaggttgatgtgatgtgcactgcttttcatgacaatgaagagacatttttgaaaaaatacttatatgaaattgccagaagacatccttacttttatgccccggaactccttttctttgctaaaaggtataaagctgcttttacagaatgttgccaagctgctgataaagctgcctgcctgttgccaaagctcgatgaacttcgggatgaagggaaggcttcgtctgccaaacagagactcaagtgtgccagtctccaaaaatttggagaaagagctttcaaagcatgggcagtagctcgcctgagccagagatttcccaaagctgagtttgcagaagtttccaagttagtgacagatcttaccaaagtccacacggaatgctgccatggagatctgcttgaatgtgctgatgacagggcggaccttgccaagtatatctgtgaaaatcaagattcgatctccagtaaactgaaggaatgctgtgaaaaacctctgttggaaaaatcccactgcattgccgaagtggaaaatgatgagatgcctgctgacttgccttcattagctgctgattttgttgaaagtaaggatgtttgcaaaaactatgctgaggcaaaggatgtcttcctgggcatgtttttgtatgaatatgcaagaaggcatcctgattactctgtcgtgctgctgctgagacttgccaagacatatgaaaccactctagagaagtgctgtgccgctgcagatcctcatgaatgctatgccaaagtgttcgatgaatttaaacctcttgtggaagagcctcagaatttaatcaaacaaaattgtgagctttttgagcagcttggagagtacaaattccagaatgcgctattagttcgttacaccaagaaagtaccccaagtgtcaactccaactcttgtagaggtctcaagaaacctaggaaaagtgggcagcaaatgttgtaaacatcctgaagcaaaaagaatgccctgtgcagaagactatctatccgtggtcctgaaccagttatgtgtgttgcatgagaaaacgccagtaagtgacagagtcaccaaatgctgcacagaatccttggtgaacaggcgaccatgcttttcagctctggaagtcgatgaaacatacgttcccaaagagtttaatgctgaaacattcaccttccatgcagatatatgcacactttctgagaaggagagacaaatcaagaaacaaactgcacttgttgagcttgtgaaacacaagcccaaggcaacaaaagagcaactgaaagctgttatggatgatttcgcagcttttgtagagaagtgctgcaaggctgacgataaggagacctgctttgccgaggagggtaaaaaacttgttgctgcaagtcaagctgccttaggcttataa

SEQ ID NO: 141 - DNA, 456 bp, Homo sapiens
atgagctccttctccaccaccaccgtgagcttcctccttttactggcattccagctcctaggtcagaccagagctaatcccatgtacaatgccgtgtccaacgcagacctgatggatttcaagaatttgctggaccatttggaagaaaagatgcctttagaagatgaggtcgtgcccccacaagtgctcagtgagccgaatgaagaagcgggggctgctctcagccccctccctgaggtgcctccctggaccggggaagtcagcccagcccagagagatggaggtgccctcgggcggggcccctgggactcctctgatcgatctgccctcctaaaaagcaagctgagggcgctgctcactgcccctcggagcctgcggagatccagctgcttcgggggcaggatggacaggattggagcccagagcggactgggctgtaacagcttccggtactga

SEQ ID NO: 142 - DNA, 456 bp, Homo sapiens; identical to SEQ ID NO: 141

SEQ ID NO: 143 - DNA, 456 bp, Homo sapiens; identical to SEQ ID NO: 141

SEQ ID NO: 144 - DNA, 456 bp, Homo sapiens; identical to SEQ ID NO: 141

SEQ ID NO: 145 - DNA, 456 bp, Homo sapiens; identical to SEQ ID NO: 141

SEQ ID NO: 146 - DNA, 456 bp, Homo sapiens; identical to SEQ ID NO: 141

SEQ ID NO: 147 - DNA, 381 bp, Homo sapiens
atgcatctctcccagctgctggcctgcgccctgctgctcacgctgctctccctccggccctccgaagccaagcccggggcgccgccgaaggtcccgcgaaccccgccggcagaggagctggccgagccgcaggctgcgggcggcggtcagaagaagggcgacaaggctcccgggggcgggggcgccaatctcaagggcgaccggtcgcgactgctccgggacctgcgcgtggacaccaagtcgcgggcagcgtgggctcgccttctgcaagagcaccccaacgcgcgcaaatacaaaggagccaacaagaagggcttgtccaagggctgcttcggcctcaagctggaccgaatcggctccatgagcggcctgggatgttag

SEQ ID NO: 148 - DNA, 381 bp, Homo sapiens; identical to SEQ ID NO: 147

SEQ ID NO: 149 - DNA, 114 bp, Dendroaspis angusticeps
gaagttaagtacgatccatgtttcggtcacaagattgatagaattaaccacgtttctaacttgggttgtccatctttgagagatccaagaccaaacgctccatctacttctgct

SEQ ID NO: 150 - DNA, 114 bp, Dendroaspis angusticeps; identical to SEQ ID NO: 149

SEQ ID NO: 151 - DNA, 96 bp, Homo sapiens; identical to SEQ ID NO: 128

SEQ ID NO: 152 - DNA, 84 bp, Homo sapiens
agcctgcggagatccagctgcttcgggggcaggatggacaggattggagcccagagcggactgggctgtaacagcttccggtac

SEQ ID NO: 153 - DNA, 282 bp, Homo sapiens
atgaagatctccgtggctgcaattcccttcttcctcctcatcaccatcgccctagggaccaagactgaatcctcctcacggggaccttaccacccctcagagtgctgcttcacctacactacctacaagatcccgcgtcagcggattatggattactatgagaccaacagccagtgctccaagcccggaattgtcttcatcaccaaaaggggccattccgtctgtaccaaccccagtgacaagtgggtccaggactatatcaaggacatgaaggagaactga

SEQ ID NO: 154 - DNA, 282 bp, Homo sapiens
atgaagatctccgtggctgcaattcccttcttcctcctcatcaccatcgccctagggaccaagactgaatcctcctcaaggggaccttaccacccctcagagtgctgcttcacctacactacctacaagatcccgcgtcagcggattatggattactatgagaccaacagccagtgctccaagcccggaattgtcttcatcaccaaaaggggccattccgtctgtaccaaccccagtgacaagtgggtccaggactatatcaaggacatgaaggagaactga

SEQ ID NO: 155 - DNA, 282 bp, Homo sapiens; identical to SEQ ID NO: 153

SEQ ID NO: 156 - DNA, 282 bp, Homo sapiens
atgaagatctccgtggctgcaattcccttcttcctcctcatcaccatcgccctagggaccaagactgaatcctcctcacggggaccttaccacccctcagagtgctgcttcacctacactacctacaagatcccgcgtcagagaattatggattactatgagaccaacagccagtgctccaagcccggaattgtcttcatcaccaaaaggggccattccgtctgtaccaaccccagtgacaagtgggtccaggactatatcaaggacatgaaggagaactga

SEQ ID NO: 157 - DNA, 282 bp, Homo sapiens; identical to SEQ ID NO: 153

SEQ ID NO: 158 - DNA, 282 bp, Homo sapiens; identical to SEQ ID NO: 153

SEQ ID NO: 159 - DNA, 282 bp, Homo sapiens; identical to SEQ ID NO: 153

SEQ ID NO: 160 - DNA, 282 bp, Homo sapiens
atgaagatctccgtggctgccattcccttcttcctcctcatcaccatcgccctagggaccaagactgaatcctcctcacggggaccttaccacccctcagagtgctgcttcacctacactacctacaagatcccgcgtcagcggattatggattactatgagaccaacagccagtgctccaagcccggaattgtcttcatcaccaaaaggggccattccgtctgtaccaaccccagtgacaagtgggtccaggactatatcaaggacatgaaggagaactga

SEQ ID NO: 161 - DNA, 279 bp, Homo sapiens
atgaagatctccgtggctgcaattcccttcttcctcctcatcaccatcgccctagggaccaagactgaatcctcctcacggggaccttaccacccctcagagtgctgcttcacctacactacctacaagatcccgcgtcagcggattatggattactatgagaccaacagccagtgctccaagcccggaattgtcttcatcaccaaaaggggccattccgtctgtaccaaccccagtgacaagtgggtccaggactatatcaaggacatgaaggagaac

SEQ ID NO: 162 - DNA, 222 bp, Homo sapiens
accaagactgaatcctcctcacggggaccttaccacccctcagagtgctgcttcacctacactacctacaagatcccgcgtcagcggattatggattactatgagaccaacagccagtgctccaagcccggaattgtcttcatcaccaaaaggggccattccgtctgtaccaaccccagtgacaagtgggtccaggactatatcaaggacatgaaggagaac

SEQ ID NO: 163 - DNA, 222 bp, Homo sapiens; identical to SEQ ID NO: 162

SEQ ID NO: 164 - DNA, 222 bp, Homo sapiens; identical to SEQ ID NO: 162

SEQ ID NO: 165 - DNA, 222 bp, Homo sapiens; identical to SEQ ID NO: 162

SEQ ID NO: 166 - DNA, 222 bp, Homo sapiens; identical to SEQ ID NO: 162

SEQ ID NO: 167 - DNA, 222 bp, Homo sapiens; identical to SEQ ID NO: 162

SEQ ID NO: 168 - DNA, 222 bp, Homo sapiens; identical to SEQ ID NO: 162

SEQ ID NO: 169 - DNA, 222 bp, Homo sapiens; identical to SEQ ID NO: 162

SEQ ID NO: 170 - DNA, 222 bp, Homo sapiens; identical to SEQ ID NO: 162

SEQ ID NO: 171 - DNA, 222 bp, Homo sapiens; identical to SEQ ID NO: 162

SEQ ID NO: 172 - DNA, 282 bp, Homo sapiens; identical to SEQ ID NO: 153

SEQ ID NO: 173 - DNA, 825 bp, Homo sapiens
atgaagatctccgtggctgcaattcccttcttcctcctcatcaccatcgccctagggaccaagactgaatcctcctcacggggaccttaccacccctcagagtgctgcttcacctacactacctacaagatcccgcgtcagcggattatggattactatgagaccaacagccagtgctccaagcccggaattgtcttcatcaccaaaaggggccattccgtctgtaccaaccccagtgacaagtgggtccaggactatatcaaggacatgaaggagaactgaatgaaaagcatttactttgtggctgggttatttgtaatgctggtacaaggcagctggcaacgttcccttcaagacacagaggagaaatccagatcattctcagcttcccaggcagacccactcagtgatcctgatcagatgaacgaggacaagcgccattcacagggcacattcaccagtgactacagcaagtatctggactccaggcgtgcccaagattttgtgcagtggttgatgaataccaagaggaacaggaataacattgccaaacgtcacgatgaatttgagagacatgctgaagggacctttaccagtgatgtaagttcttatttggaaggccaagctgccaaggaattcattgcttggctggtgaaaggccgaggaaggcgagatttcccagaagaggtcgccattgttgaagaacttggccgcagacatgctgatggttctttctctgatgagatgaacaccattcttgataatcttgccgccagggactttataaactggttgattcagaccaaaatcactgacaggaaataa

SEQ ID NO: 174 - DNA, 282 bp, Homo sapiens; identical to SEQ ID NO: 153

SEQ ID NO: 175 - DNA, 195 bp, Homo sapiens
ccttaccacccctcagagtgctgcttcacctacactacctacaagatcccgcgtcagcggattatggattactatgagaccaacagccagtgctccaagcccggaattgtcttcatcaccaaaaggggccattccgtctgtaccaaccccagtgacaagtgggtccaggactatatcaaggacatgaaggagaac

SEQ ID NO: 176 - DNA, 195 bp, Homo sapiens; identical to SEQ ID NO: 175

SEQ ID NO: 177 - DNA, 198 bp, Homo sapiens
ggaccttaccacccctcagagtgctgcttcacctacactacctacaagatcccgcgtcagcggattatggattactatgagaccaacagccagtgctccaagcccggaattgtcttcatcaccaaaaggggccattccgtctgtaccaaccccagtgacaagtgggtccaggactatatcaaggacatgaaggagaac

SEQ ID NO: 178 - DNA, 282 bp, Homo sapiens; identical to SEQ ID NO: 153

SEQ ID NO: 179 - DNA, 282 bp, Homo sapiens; identical to SEQ ID NO: 153

SEQ ID NO: 180 - DNA, 282 bp, Homo sapiens; identical to SEQ ID NO: 153

SEQ ID NO: 181 - DNA, 282 bp, Homo sapiens; identical to SEQ ID NO: 153

SEQ ID NO: 182 - DNA, 282 bp, Homo sapiens; identical to SEQ ID NO: 153

SEQ ID NO: 183 - DNA, 198 bp, Homo sapiens; identical to SEQ ID NO: 177

SEQ ID NO: 184 - DNA, 198 bp, Homo sapiens; identical to SEQ ID NO: 177

SEQ ID NO: 185 - DNA, 201 bp, Homo sapiens
ggaccttaccacccctcagagtgctgcttcacctacactacctacaagatcccgcgtcagcggattatggattactatgagaccaacagccagtgctccaagcccggaattgtcttcatcaccaaaaggggccattccgtctgtaccaaccccagtgacaagtgggtccaggactatatcaaggacatgaaggagaactga

SEQ ID NO: 186 - DNA, 201 bp, Homo sapiens; identical to SEQ ID NO: 185

SEQ ID NO: 187 - DNA, 201 bp, Homo sapiens; identical to SEQ ID NO: 185

SEQ ID NO: 188 - DNA, 201 bp, Homo sapiens; identical to SEQ ID NO: 185

SEQ ID NO: 189 - DNA, 201 bp, Homo sapiens; identical to SEQ ID NO: 185

SEQ ID NO: 190 - DNA, 201 bp, Homo sapiens; identical to SEQ ID NO: 185

SEQ ID NO: 191 - DNA, 279 bp, Homo sapiens; identical to SEQ ID NO: 161

SEQ ID NO: 192 - protein, 767 aa, Homo sapiens
MFKSVVYSILAASLANADAHKSEVAHRFKDLGEENFKALVLIAFAQYLQQCPFEDHVKLVNEVTEFAKTCVADESAENCDKSLHTLFGDKLCTVATLRETYGEMADCCAKQEPERNECFLQHKDDNPNLPRLVRPEVDVMCTAFHDNEETFLKKYLYEIARRHPYFYAPELLFFAKRYKAAFTECCQAADKAACLLPKLDELRDEGKASSAKQRLKCASLQKFGERAFKAWAVARLSQRFPKAEFAEVSKLVTDLTKVHTECCHGDLLECADDRADLAKYICENQDSISSKLKECCEKPLLEKSHCIAEVENDEMPADLPSLAADFVESKDVCKNYAEAKDVFLGMFLYEYARRHPDYSVVLLLRLAKTYETTLEKCCAAADPHECYAKVFDEFKPLVEEPQNLIKQNCELFEQLGEYKFQNALLVRYTKKVPQVSTPTLVEVSRNLGKVGSKCCKHPEAKRMPCAEDYLSVVLNQLCVLHEKTPVSDRVTKCCTESLVNRRPCFSALEVDETYVPKEFNAETFTFHADICTLSEKERQIKKQTALVELVKHKPKATKEQLKAVMDDFAAFVEKCCKADDKETCFAEEGKKLVAASQAALGLCDLPQTHSLGSRRTLMLLAQMRRISLFSCLKDRHDFGFPQEEFGNQFQKAETIPVLHEMIQQIFNLFSTKDSSAAWDETLLDKFYTELYQQLNDLEACVIQGVGVTETPLMKEDSILAVRKYFQRITLYLKEKKYSPCAWEVVRAEIMRSFSLSTNLQESLRSKE

SEQ ID NO: 193 - protein, 769 aa, Homo sapiens
MLLQAFLFLLAGFAAKISADAHKSEVAHRFKDLGEENFKALVLIAFAQYLQQCPFEDHVKLVNEVTEFAKTCVADESAENCDKSLHTLFGDKLCTVATLRETYGEMADCCAKQEPERNECFLQHKDDNPNLPRLVRPEVDVMCTAFHDNEETFLKKYLYEIARRHPYFYAPELLFFAKRYKAAFTECCQAADKAACLLPKLDELRDEGKASSAKQRLKCASLQKFGERAFKAWAVARLSQRFPKAEFAEVSKLVTDLTKVHTECCHGDLLECADDRADLAKYICENQDSISSKLKECCEKPLLEKSHCIAEVENDEMPADLPSLAADFVESKDVCKNYAEAKDVFLGMFLYEYARRHPDYSVVLLLRLAKTYETTLEKCCAAADPHECYAKVFDEFKPLVEEPQNLIKQNCELFEQLGEYKFQNALLVRYTKKVPQVSTPTLVEVSRNLGKVGSKCCKHPEAKRMPCAEDYLSVVLNQLCVLHEKTPVSDRVTKCCTESLVNRRPCFSALEVDETYVPKEFNAETFTFHADICTLSEKERQIKKQTALVELVKHKPKATKEQLKAVMDDFAAFVEKCCKADDKETCFAEEGKKLVAASQAALGLCDLPQTHSLGSRRTLMLLAQMRRISLFSCLKDRHDFGFPQEEFGNQFQKAETIPVLHEMIQQIFNLFSTKDSSAAWDETLLDKFYTELYQQLNDLEACVIQGVGVTETPLMKEDSILAVRKYFQRITLYLKEKKYSPCAWEVVRAEIMRSFSLSTNLQESLRSKE

SEQ ID NO: 194 - protein, 779 aa, Homo sapiens
MNIFYIFLFLLSFVQGLEHTHRRGSLDKRDAHKSEVAHRFKDLGEENFKALVLIAFAQYLQQCPFEDHVKLVNEVTEFAKTCVADESAENCDKSLHTLFGDKLCTVATLRETYGEMADCCAKQEPERNECFLQHKDDNPNLPRLVRPEVDVMCTAFHDNEETFLKKYLYEIARRHPYFYAPELLFFAKRYKAAFTECCQAADKAACLLPKLDELRDEGKASSAKQRLKCASLQKFGERAFKAWAVARLSQRFPKAEFAEVSKLVTDLTKVHTECCHGDLLECADDRADLAKYICENQDSISSKLKECCEKPLLEKSHCIAEVENDEMPADLPSLAADFVESKDVCKNYAEAKDVFLGMFLYEYARRHPDYSVVLLLRLAKTYETTLEKCCAAADPHECYAKVFDEFKPLVEEPQNLIKQNCELFEQLGEYKFQNALLVRYTKKVPQVSTPTLVEVSRNLGKVGSKCCKHPEAKRMPCAEDYLSVVLNQLCVLHEKTPVSDRVTKCCTESLVNRRPCFSALEVDETYVPKEFNAETFTFHADICTLSEKERQIKKQTALVELVKHKPKATKEQLKAVMDDFAAFVEKCCKADDKETCFAEEGKKLVAASQAALGLCDLPQTHSLGSRRTLMLLAQMRRISLFSCLKDRHDFGFPQEEFGNQFQKAETIPVLHEMIQQIFNLFSTKDSSAAWDETLLDKFYTELYQQLNDLEACVIQGVGVTETPLMKEDSILAVRKYFQRITLYLKEKKYSPCAWEVVRAEIMRSFSLSTNLQESLRSKE

SEQ ID NO: 195 - protein, 774 aa, Homo sapiens
MKWVSFISLLFLFSSAYSRSLDKRCDLPQTHSLGSRRTLMLLAQMRRISLFSCLKDRHDFGFPQEEFGNQFQKAETIPVLHEMIQQIFNLFSTKDSSAAWDETLLDKFYTELYQQLNDLEACVIQGVGVTETPLMKEDSILAVRKYFQRITLYLKEKKYSPCAWEVVRAEIMRSFSLSTNLQESLRSKEDAHKSEVAHRFKDLGEENFKALVLIAFAQYLQQCPFEDHVKLVNEVTEFAKTCVADESAENCDKSLHTLFGDKLCTVATLRETYGEMADCCAKQEPERNECFLQHKDDNPNLPRLVRPEVDVMCTAFHDNEETFLKKYLYEIARRHPYFYAPELLFFAKRYKAAFTECCQAADKAACLLPKLDELRDEGKASSAKQRLKCASLQKFGERAFKAWAVARLSQRFPKAEFAEVSKLVTDLTKVHTECCHGDLLECADDRADLAKYICENQDSISSKLKECCEKPLLEKSHCIAEVENDEMPADLPSLAADFVESKDVCKNYAEAKDVFLGMFLYEYARRHPDYSVVLLLRLAKTYETTLEKCCAAADPHECYAKVFDEFKPLVEEPQNLIKQNCELFEQLGEYKFQNALLVRYTKKVPQVSTPTLVEVSRNLGKVGSKCCKHPEAKRMPCAEDYLSVVLNQLCVLHEKTPVSDRVTKCCTESLVNRRPCFSALEVDETYVPKEFNAETFTFHADICTLSEKERQIKKQTALVELVKHKPKATKEQLKAVMDDFAAFVEKCCKADDKETCFAEEGKKLVAASQAALGL

SEQ ID NO: 196 - protein, 769 aa, Homo sapiens
MLLQAFLFLLAGFAAKISACDLPQTHSLGSRRTLMLLAQMRRISLFSCLKDRHDFGFPQEEFGNQFQKAETIPVLHEMIQQIFNLFSTKDSSAAWDETLLDKFYTELYQQLNDLEACVIQGVGVTETPLMKEDSILAVRKYFQRITLYLKEKKYSPCAWEVVRAEIMRSFSLSTNLQESLRSKEDAHKSEVAHRFKDLGEENFKALVLIAFAQYLQQCPFEDHVKLVNEVTEFAKTCVADESAENCDKSLHTLFGDKLCTVATLRETYGEMADCCAKQEPERNECFLQHKDDNPNLPRLVRPEVDVMCTAFHDNEETFLKKYLYEIARRHPYFYAPELLFFAKRYKAAFTECCQAADKAACLLPKLDELRDEGKASSAKQRLKCASLQKFGERAFKAWAVARLSQRFPKAEFAEVSKLVTDLTKVHTECCHGDLLECADDRADLAKYICENQDSISSKLKECCEKPLLEKSHCIAEVENDEMPADLPSLAADFVESKDVCKNYAEAKDVFLGMFLYEYARRHPDYSVVLLLRLAKTYETTLEKCCAAADPHECYAKVFDEFKPLVEEPQNLIKQNCELFEQLGEYKFQNALLVRYTKKVPQVSTPTLVEVSRNLGKVGSKCCKHPEAKRMPCAEDYLSVVLNQLCVLHEKTPVSDRVTKCCTESLVNRRPCFSALEVDETYVPKEFNAETFTFHADICTLSEKERQIKKQTALVELVKHKPKATKEQLKAVMDDFAAFVEKCCKADDKETCFAEEGKKLVAASQAALGL

SEQ ID NO: 197 - protein, 835 aa, Homo sapiens [sequence omitted]

SEQ ID NO: 198 - protein, 774 aa, Homo sapiens
MKWVTFISLLFLFSSAYSRGVFRRDAHKSEVAHRFKDLGEENFKALVLIAFAQYLQQCPFEDHVKLVNEVTEFAKTCVADESAENCDKSLHTLFGDKLCTVATLRETYGEMADCCAKQEPERNECFLQHKDDNPNLPRLVRPEVDVMCTAFHDNEETFLKKYLYEIARRHPYFYAPELLFFAKRYKAAFTECCQAADKAACLLPKLDELRDEGKASSAKQRLKCASLQKFGERAFKAWAVARLSQRFPKAEFAEVSKLVTDLTKVHTECCHGDLLECADDRADLAKYICENQDSISSKLKECCEKPLLEKSHCIAEVENDEMPADLPSLAADFVESKDVCKNYAEAKDVFLGMFLYEYARRHPDYSVVLLLRLAKTYETTLEKCCAAADPHECYAKVFDEFKPLVEEPQNLIKQNCELFEQLGEYKFQNALLVRYTKKVPQVSTPTLVEVSRNLGKVGSKCCKHPEAKRMPCAEDYLSVVLNQLCVLHEKTPVSDRVTKCCTESLVNRRPCFSALEVDETYVPKEFNAETFTFHADICTLSEKERQIKKQTALVELVKHKPKATKEQLKAVMDDFAAFVEKCCKADDKETCFAEEGKKLVAASQAALGLCDLPQTHSLGSRRTLMLLAQMRRISLFSCLKDRHDFGFPQEEFGNQFQKAETIPVLHEMIQQIFNLFSTKDSSAAWDETLLDKFYTELYQQLNDLEACVIQGVGVTETPLMKEDSILAVRKYFQRITLYLKEKKYSPCAWEVVRAEIMRSFSLSTNLQESLRSKE

SEQ ID NO: 199 - protein, 773 aa, Homo sapiens
MALTFALLVALLVLSCKSSCSVGCDLPQTHSLGSRRTLMLLAQMRRISLFSCLKDRHDFGFPQEEFGNQFQKAETIPVLHEMIQQIFNLFSTKDSSAAWDETLLDKFYTELYQQLNDLEACVIQGVGVTETPLMKEDSILAVRKYFQRITLYLKEKKYSPCAWEVVRAEIMRSFSLSTNLQESLRSKEDAHKSEVAHRFKDLGEENFKALVLIAFAQYLQQCPFEDHVKLVNEVTEFAKTCVADESAENCDKSLHTLFGDKLCTVATLRETYGEMADCCAKQEPERNECFLQHKDDNPNLPRLVRPEVDVMCTAFHDNEETFLKKYLYEIARRHPYFYAPELLFFAKRYKAAFTECCQAADKAACLLPKLDELRDEGKASSAKQRLKCASLQKFGERAFKAWAVARLSQRFPKAEFAEVSKLVTDLTKVHTECCHGDLLECADDRADLAKYICENQDSISSKLKECCEKPLLEKSHCIAEVENDEMPADLPSLAADFVESKDVCKNYAEAKDVFLGMFLYEYARRHPDYSVVLLLRLAKTYETTLEKCCAAADPHECYAKVFDEFKPLVEEPQNLIKQNCELFEQLGEYKFQNALLVRYTKKVPQVSTPTLVEVSRNLGKVGSKCCKHPEAKRMPCAEDYLSVVLNQLCVLHEKTPVSDRVTKCCTESLVNRRPCFSALEVDETYVPKEFNAETFTFHADICTLSEKERQIKKQTALVELVKHKPKATKEQLKAVMDDFAAFVEKCCKADDKETCFAEEGKKLVAASQAALGL

SEQ ID NO: 200 - protein, 769 aa, Homo sapiens; identical to SEQ ID NO: 196

SEQ ID NO: 201 - protein, 774 aa, Homo sapiens
MKWVSFISLLFLFSSAYSRSLDKRDAHKSEVAHRFKDLGEENFKALVLIAFAQYLQQCPFEDHVKLVNEVTEFAKTCVADESAENCDKSLHTLFGDKLCTVATLRETYGEMADCCAKQEPERNECFLQHKDDNPNLPRLVRPEVDVMCTAFHDNEETFLKKYLYEIARRHPYFYAPELLFFAKRYKAAFTECCQAADKAACLLPKLDELRDEGKASSAKQRLKCASLQKFGERAFKAWAVARLSQRFPKAEFAEVSKLVTDLTKVHTECCHGDLLECADDRADLAKYICENQDSISSKLKECCEKPLLEKSHCIAEVENDEMPADLPSLAADFVESKDVCKNYAEAKDVFLGMFLYEYARRHPDYSVVLLLRLAKTYETTLEKCCAAADPHECYAKVFDEFKPLVEEPQNLIKQNCELFEQLGEYKFQNALLVRYTKKVPQVSTPTLVEVSRNLGKVGSKCCKHPEAKRMPCAEDYLSVVLNQLCVLHEKTPVSDRVTKCCTESLVNRRPCFSALEVDETYVPKEFNAETFTFHADICTLSEKERQIKKQTALVELVKHKPKATKEQLKAVMDDFAAFVEKCCKADDKETCFAEEGKKLVAASQAALGLCDLPQTHSLGSRRTLMLLAQMRRISLFSCLKDRHDFGFPQEEFGNQFQKAETIPVLHEMIQQIFNLFSTKDSSAAWDETLLDKFYTELYQQLNDLEACVIQGVGVTETPLMKEDSILAVRKYFQRITLYLKEKKYSPCAWEVVRAEIMRSFSLSTNLQESLRSKE

SEQ ID NO: 202 - protein, 774 aa, Homo sapiens
MKWVSFISLLFLFSSAYSGSLDKRDAHKSEVAHRFKDLGEENFKALVLIAFAQYLQQCPFEDHVKLVNEVTEFAKTCVADESAENCDKSLHTLFGDKLCTVATLRETYGEMADCCAKQEPERNECFLQHKDDNPNLPRLVRPEVDVMCTAFHDNEETFLKKYLYEIARRHPYFYAPELLFFAKRYKAAFTECCQAADKAACLLPKLDELRDEGKASSAKQRLKCASLQKFGERAFKAWAVARLSQRFPKAEFAEVSKLVTDLTKVHTECCHGDLLECADDRADLAKYICENQDSISSKLKECCEKPLLEKSHCIAEVENDEMPADLPSLAADFVESKDVCKNYAEAKDVFLGMFLYEYARRHPDYSVVLLLRLAKTYETTLEKCCAAADPHECYAKVFDEFKPLVEEPQNLIKQNCELFEQLGEYKFQNALLVRYTKKVPQVSTPTLVEVSRNLGKVGSKCCKHPEAKRMPCAEDYLSVVLNQLCVLHEKTPVSDRVTKCCTESLVNRRPCFSALEVDETYVPKEFNAETFTFHADICTLSEKERQIKKQTALVELVKHKPKATKEQLKAVMDDFAAFVEKCCKADDKETCFAEEGKKLVAASQAALGLCDLPQTHSLGSRRTLMLLAQMRRISLFSCLKDRHDFGFPQEEFGNQFQKAETIPVLHEMIQQIFNLFSTKDSSAAWDETLLDKFYTELYQQLNDLEACVIQGVGVTETPLMKEDSILAVRKYFQRITLYLKEKKYSPCAWEVVRAEIMRSFSLSTNLQESLRSKE

SEQ ID NO: 203 - protein, 638 aa, Homo sapiens
MKVSVAALSCLMLVTALGSQASPKMVQGSGCFGRKMDRISSSSGLGCKVLRRHDAHKSEVAHRFKDLGEENFKALVLIAFAQYLQQCPFEDHVKLVNEVTEFAKTCVADESAENCDKSLHTLFGDKLCTVATLRETYGEMADCCAKQEPERNECFLQHKDDNPNLPRLVRPEVDVMCTAFHDNEETFLKKYLYEIARRHPYFYAPELLFFAKRYKAAFTECCQAADKAACLLPKLDELRDEGKASSAKQRLKCASLQKFGERAFKAWAVARLSQRFPKAEFAEVSKLVTDLTKVHTECCHGDLLECADDRADLAKYICENQDSISSKLKECCEKPLLEKSHCIAEVENDEMPADLPSLAADFVESKDVCKNYAEAKDVFLGMFLYEYARRHPDYSVVLLLRLAKTYETTLEKCCAAADPHECYAKVFDEFKPLVEEPQNLIKQNCELFEQLGEYKFQNALLVRYTKKVPQVSTPTLVEVSRNLGKVGSKCCKHPEAKRMPCAEDYLSVVLNQLCVLHEKTPVSDRVTKCCTESLVNRRPCFSALEVDETYVPKEFNAETFTFHADICTLSEKERQIKKQTALVELVKHKPKATKEQLKAVMDDFAAFVEKCCKADDKETCFAEEGKKLVAASQAALGL

SEQ ID NO: 204 - protein, 638 aa, Homo sapiens
MWWRLWWLLLLLLLLWPMVWASPKMVQGSGCFGRKMDRISSSSGLGCKVLRRHDAHKSEVAHRFKDLGEENFKALVLIAFAQYLQQCPFEDHVKLVNEVTEFAKTCVADESAENCDKSLHTLFGDKLCTVATLRETYGEMADCCAKQEPERNECFLQHKDDNPNLPRLVRPEVDVMCTAFHDNEETFLKKYLYEIARRHPYFYAPELLFFAKRYKAAFTECCQAADKAACLLPKLDELRDEGKASSAKQRLKCASLQKFGERAFKAWAVARLSQRFPKAEFAEVSKLVTDLTKVHTECCHGDLLECADDRADLAKYICENQDSISSKLKECCEKPLLEKSHCIAEVENDEMPADLPSLAADFVESKDVCKNYAEAKDVFLGMFLYEYARRHPDYSVVLLLRLAKTYETTLEKCCAAADPHECYAKVFDEFKPLVEEPQNLIKQNCELFEQLGEYKFQNALLVRYTKKVPQVSTPTLVEVSRNLGKVGSKCCKHPEAKRMPCAEDYLSVVLNQLCVLHEKTPVSDRVTKCCTESLVNRRPCFSALEVDETYVPKEFNAETFTFHADICTLSEKERQIKKQTALVELVKHKPKATKEQLKAVMDDFAAFVEKCCKADDKETCFAEEGKKLVAASQAALGL

SEQ ID NO: 205 - protein, 574 aa, Homo sapiens
MKWVSFISLLFLFSSAYSRSLDKRSPKMVQGSGCFGRKMDRISSSSGLGCKVLSLHTLFGDKLCTVATLRETYGEMADCCAKQEPERNECFLQHKDDNPNLPRLVRPEVDVMCTAFHDNEETFLKKYLYEIARRHPYFYAPELLFFAKRYKAAFTECCQAADKAACLLPKLDELRDEGKASSAKQRLKCASLQKFGERAFKAWAVARLSQRFPKAEFAEVSKLVTDLTKVHTECCHGDLLECADDRADLAKYICENQDSISSKLKECCEKPLLEKSHCIAEVENDEMPADLPSLAADFVESKDVCKNYAEAKDVFLGMFLYEYARRHPDYSVVLLLRLAKTYETTLEKCCAAADPHECYAKVFDEFKPLVEEPQNLIKQNCELFEQLGEYKFQNALLVRYTKKVPQVSTPTLVEVSRNLGKVGSKCCKHPEAKRMPCAEDYLSVVLNQLCVLHEKTPVSDRVTKCCTESLVNRRPCFSALEVDETYVPKEFNAETFTFHADICTLSEKERQIKKQTALVELVKHKPKATKEQLKAVMDDFAAFVEKCCKADDKETCFAEEGKKLVAASQAALGL

SEQ ID NO: 206 - protein, 638 aa, Homo sapiens; identical to SEQ ID NO: 203

SEQ ID NO: 207 - protein, 638 aa, Homo sapiens; identical to SEQ ID NO: 204

SEQ ID NO: 208 - protein, 640 aa, Homo sapiens
MRPTWAWWLFLVLLLALWAPARGSPKMVQGSGCFGRKMDRISSSSGLGCKVLRRHDAHKSEVAHRFKDLGEENFKALVLIAFAQYLQQCPFEDHVKLVNEVTEFAKTCVADESAENCDKSLHTLFGDKLCTVATLRETYGEMADCCAKQEPERNECFLQHKDDNPNLPRLVRPEVDVMCTAFHDNEETFLKKYLYEIARRHPYFYAPELLFFAKRYKAAFTECCQAADKAACLLPKLDELRDEGKASSAKQRLKCASLQKFGERAFKAWAVARLSQRFPKAEFAEVSKLVTDLTKVHTECCHGDLLECADDRADLAKYICENQDSISSKLKECCEKPLLEKSHCIAEVENDEMPADLPSLAADFVESKDVCKNYAEAKDVFLGMFLYEYARRHPDYSVVLLLRLAKTYETTLEKCCAAADPHECYAKVFDEFKPLVEEPQNLIKQNCELFEQLGEYKFQNALLVRYTKKVPQVSTPTLVEVSRNLGKVGSKCCKHPEAKRMPCAEDYLSVVLNQLCVLHEKTPVSDRVTKCCTESLVNRRPCFSALEVDETYVPKEFNAETFTFHADICTLSEKERQIKKQTALVELVKHKPKATKEQLKAVMDDFAAFVEKCCKADDKETCFAEEGKKLVAASQAALGL

SEQ ID NO: 209 - protein, 640 aa, Homo sapiens; identical to SEQ ID NO: 208

SEQ ID NO: 210 - protein, 638 aa, Homo sapiens
MKVSVAALSCLMLVTALGSQASPKMVQGSGCFGGKMDRISSSSGLGCKVLRRHDAHKSEVAHRFKDLGEENFKALVLIAFAQYLQQCPFEDHVKLVNEVTEFAKTCVADESAENCDKSLHTLFGDKLCTVATLRETYGEMADCCAKQEPERNECFLQHKDDNPNLPRLVRPEVDVMCTAFHDNEETFLKKYLYEIARRHPYFYAPELLFFAKRYKAAFTECCQAADKAACLLPKLDELRDEGKASSAKQRLKCASLQKFGERAFKAWAVARLSQRFPKAEFAEVSKLVTDLTKVHTECCHGDLLECADDRADLAKYICENQDSISSKLKECCEKPLLEKSHCIAEVENDEMPADLPSLAADFVESKDVCKNYAEAKDVFLGMFLYEYARRHPDYSVVLLLRLAKTYETTLEKCCAAADPHECYAKVFDEFKPLVEEPQNLIKQNCELFEQLGEYKFQNALLVRYTKKVPQVSTPTLVEVSRNLGKVGSKCCKHPEAKRMPCAEDYLSVVLNQLCVLHEKTPVSDRVTKCCTESLVNRRPCFSALEVDETYVPKEFNAETFTFHADICTLSEKERQIKKQTALVELVKHKPKATKEQLKAVMDDFAAFVEKCCKADDKETCFAEEGKKLVAASQAALGL

SEQ ID NO: 211 - protein, 571 aa, Homo sapiens
MWWRLWWLLLLLLLLWPMVWASPKMVQGSGCFGRKMDRISSSSGLGCKVLSLHTLFGDKLCTVATLRETYGEMADCCAKQEPERNECFLQHKDDNPNLPRLVRPEVDVMCTAFHDNEETFLKKYLYEIARRHPYFYAPELLFFAKRYKAAFTECCQAADKAACLLPKLDELRDEGKASSAKQRLKCASLQKFGERAFKAWAVARLSQRFPKAEFAEVSKLVTDLTKVHTECCHGDLLECADDRADLAKYICENQDSISSKLKECCEKPLLEKSHCIAEVENDEMPADLPSLAADFVESKDVCKNYAEAKDVFLGMFLYEYARRHPDYSVVLLLRLAKTYETTLEKCCAAADPHECYAKVFDEFKPLVEEPQNLIKQNCELFEQLGEYKFQNALLVRYTKKVPQVSTPTLVEVSRNLGKVGSKCCKHPEAKRMPCAEDYLSVVLNQLCVLHEKTPVSDRVTKCCTESLVNRRPCFSALEVDETYVPKEFNAETFTFHADICTLSEKERQIKKQTALVELVKHKPKATKEQLKAVMDDFAAFVEKCCKADDKETCFAEEGKKLVAASQAALGL

SEQ ID NO: 212 - protein, 638 aa, Homo sapiens
MWWRLWWLLLLLLLLWPMVWASPKMVQGSGCFGGKMDRISSSSGLGCKVLRRHDAHKSEVAHRFKDLGEENFKALVLIAFAQYLQQCPFEDHVKLVNEVTEFAKTCVADESAENCDKSLHTLFGDKLCTVATLRETYGEMADCCAKQEPERNECFLQHKDDNPNLPRLVRPEVDVMCTAFHDNEETFLKKYLYEIARRHPYFYAPELLFFAKRYKAAFTECCQAADKAACLLPKLDELRDEGKASSAKQRLKCASLQKFGERAFKAWAVARLSQRFPKAEFAEVSKLVTDLTKVHTECCHGDLLECADDRADLAKYICENQDSISSKLKECCEKPLLEKSHCIAEVENDEMPADLPSLAADFVESKDVCKNYAEAKDVFLGMFLYEYARRHPDYSVVLLLRLAKTYETTLEKCCAAADPHECYAKVFDEFKPLVEEPQNLIKQNCELFEQLGEYKFQNALLVRYTKKVPQVSTPTLVEVSRNLGKVGSKCCKHPEAKRMPCAEDYLSVVLNQLCVLHEKTPVSDRVTKCCTESLVNRRPCFSALEVDETYVPKEFNAETFTFHADICTLSEKERQIKKQTALVELVKHKPKATKEQLKAVMDDFAAFVEKCCKADDKETCFAEEGKKLVAASQAALGL

SEQ ID NO: 213 - protein, 638 aa, Homo sapiens
MWWRLWWLLLLLLLLWPMVWASPKMVQGSGCFGRGMDRISSSSGLGCKVLRRHDAHKSEVAHRFKDLGEENFKALVLIAFAQYLQQCPFEDHVKLVNEVTEFAKTCVADESAENCDKSLHTLFGDKLCTVATLRETYGEMADCCAKQEPERNECFLQHKDDNPNLPRLVRPEVDVMCTAFHDNEETFLKKYLYEIARRHPYFYAPELLFFAKRYKAAFTECCQAADKAACLLPKLDELRDEGKASSAKQRLKCASLQKFGERAFKAWAVARLSQRFPKAEFAEVSKLVTDLTKVHTECCHGDLLECADDRADLAKYICENQDSISSKLKECCEKPLLEKSHCIAEVENDEMPADLPSLAADFVESKDVCKNYAEAKDVFLGMFLYEYARRHPDYSVVLLLRLAKTYETTLEKCCAAADPHECYAKVFDEFKPLVEEPQNLIKQNCELFEQLGEYKFQNALLVRYTKKVPQVSTPTLVEVSRNLGKVGSKCCKHPEAKRMPCAEDYLSVVLNQLCVLHEKTPVSDRVTKCCTESLVNRRPCFSALEVDETYVPKEFNAETFTFHADICTLSEKERQIKKQTALVELVKHKPKATKEQLKAVMDDFAAFVEKCCKADDKETCFAEEGKKLVAASQAALGL

SEQ ID NO: 214 - protein, 641 aa, Homo sapiens
MKWVSFISLLFLFSSAYSRSLDKRDAHKSEVAHRFKDLGEENFKALVLIAFAQYLQQCPFEDHVKLVNEVTEFAKTCVADESAENCDKSLHTLFGDKLCTVATLRETYGEMADCCAKQEPERNECFLQHKDDNPNLPRLVRPEVDVMCTAFHDNEETFLKKYLYEIARRHPYFYAPELLFFAKRYKAAFTECCQAADKAACLLPKLDELRDEGKASSAKQRLKCASLQKFGERAFKAWAVARLSQRFPKAEFAEVSKLVTDLTKVHTECCHGDLLECADDRADLAKYICENQDSISSKLKECCEKPLLEKSHCIAEVENDEMPADLPSLAADFVESKDVCKNYAEAKDVFLGMFLYEYARRHPDYSVVLLLRLAKTYETTLEKCCAAADPHECYAKVFDEFKPLVEEPQNLIKQNCELFEQLGEYKFQNALLVRYTKKVPQVSTPTLVEVSRNLGKVGSKCCKHPEAKRMPCAEDYLSVVLNQLCVLHEKTPVSDRVTKCCTESLVNRRPCFSALEVDETYVPKEFNAETFTFHADICTLSEKERQIKKQTALVELVKHKPKATKEQLKAVMDDFAAFVEKCCKADDKETCFAEEGKKLVAASQAALGLSPKMVQGSGCFGRKMDRISSSSGLGCKVLRRH

SEQ ID NO: 215 - protein, 642 aa, Homo sapiens
MKWVSFISLLFLFSSAYSRSLDKRSPKMVQGSGCFGRKMDRISSSSGLGCKVLRGGGDAHKSEVAHRFKDLGEENFKALVLIAFAQYLQQCPFEDHVKLVNEVTEFAKTCVADESAENCDKSLHTLFGDKLCTVATLRETYGEMADCCAKQEPERNECFLQHKDDNPNLPRLVRPEVDVMCTAFHDNEETFLKKYLYEIARRHPYFYAPELLFFAKRYKAAFTECCQAADKAACLLPKLDELRDEGKASSAKQRLKCASLQKFGERAFKAWAVARLSQRFPKAEFAEVSKLVTDLTKVHTECCHGDLLECADDRADLAKYICENQDSISSKLKECCEKPLLEKSHCIAEVENDEMPADLPSLAADFVESKDVCKNYAEAKDVFLGMFLYEYARRHPDYSVVLLLRLAKTYETTLEKCCAAADPHECYAKVFDEFKPLVEEPQNLIKQNCELFEQLGEYKFQNALLVRYTKKVPQVSTPTLVEVSRNLGKVGSKCCKHPEAKRMPCAEDYLSVVLNQLCVLHEKTPVSDRVTKCCTESLVNRRPCFSALEVDETYVPKEFNAETFTFHADICTLSEKERQIKKQTALVELVKHKPKATKEQLKAVMDDFAAFVEKCCKADDKETCFAEEGKKLVAASQAALGL

SEQ ID NO: 216 - protein, 639 aa, Homo sapiens
MKWVSFISLLFLFSSAYSRSLDKRNPMYNAVSNADLMDFKNLLDHLEEKMPLEDDAHKSEVAHRFKDLGEENFKALVLIAFAQYLQQCPFEDHVKLVNEVTEFAKTCVADESAENCDKSLHTLFGDKLCTVATLRETYGEMADCCAKQEPERNECFLQHKDDNPNLPRLVRPEVDVMCTAFHDNEETFLKKYLYEIARRHPYFYAPELLFFAKRYKAAFTECCQAADKAACLLPKLDELRDEGKASSAKQRLKCASLQKFGERAFKAWAVARLSQRFPKAEFAEVSKLVTDLTKVHTECCHGDLLECADDRADLAKYICENQDSISSKLKECCEKPLLEKSHCIAEVENDEMPADLPSLAADFVESKDVCKNYAEAKDVFLGMFLYEYARRHPDYSVVLLLRLAKTYETTLEKCCAAADPHECYAKVFDEFKPLVEEPQNLIKQNCELFEQLGEYKFQNALLVRYTKKVPQVSTPTLVEVSRNLGKVGSKCCKHPEAKRMPCAEDYLSVVLNQLCVLHEKTPVSDRVTKCCTESLVNRRPCFSALEVDETYVPKEFNAETFTFHADICTLSEKERQIKKQTALVELVKHKPKATKEQLKAVMDDFAAFVEKCCKADDKETCFAEEGKKLVAASQAALGL

SEQ ID NO: 217 - protein, 639 aa, Homo sapiens
MKWVSFISLLFLFSSAYSRSLDKRDAHKSEVAHRFKDLGEENFKALVLIAFAQYLQQCPFEDHVKLVNEVTEFAKTCVADESAENCDKSLHTLFGDKLCTVATLRETYGEMADCCAKQEPERNECFLQHKDDNPNLPRLVRPEVDVMCTAFHDNEETFLKKYLYEIARRHPYFYAPELLFFAKRYKAAFTECCQAADKAACLLPKLDELRDEGKASSAKQRLKCASLQKFGERAFKAWAVARLSQRFPKAEFAEVSKLVTDLTKVHTECCHGDLLECADDRADLAKYICENQDSISSKLKECCEKPLLEKSHCIAEVENDEMPADLPSLAADFVESKDVCKNYAEAKDVFLGMFLYEYARRHPDYSVVLLLRLAKTYETTLEKCCAAADPHECYAKVFDEFKPLVEEPQNLIKQNCELFEQLGEYKFQNALLVRYTKKVPQVSTPTLVEVSRNLGKVGSKCCKHPEAKRMPCAEDYLSVVLNQLCVLHEKTPVSDRVTKCCTESLVNRRPCFSALEVDETYVPKEFNAETFTFHADICTLSEKERQIKKQTALVELVKHKPKATKEQLKAVMDDFAAFVEKCCKADDKETCFAEEGKKLVAASQAALGLNPMYNAVSNADLMDFKNLLDHLEEKMPLED

SEQ ID NO: 218 - protein, 646 aa, Homo sapiens
MKWVSFISLLFLFSSAYSRSLDKREVVPPQVLSEPNEEAGAALSPLPEVPPWTGEVSPAQRDAHKSEVAHRFKDLGEENFKALVLIAFAQYLQQCPFEDHVKLVNEVTEFAKTCVADESAENCDKSLHTLFGDKLCTVATLRETYGEMADCCAKQEPERNECFLQHKDDNPNLPRLVRPEVDVMCTAFHDNEETFLKKYLYEIARRHPYFYAPELLFFAKRYKAAFTECCQAADKAACLLPKLDELRDEGKASSAKQRLKCASLQKFGERAFKAWAVARLSQRFPKAEFAEVSKLVTDLTKVHTECCHGDLLECADDRADLAKYICENQDSISSKLKECCEKPLLEKSHCIAEVENDEMPADLPSLAADFVESKDVCKNYAEAKDVFLGMFLYEYARRHPDYSVVLLLRLAKTYETTLEKCCAAADPHECYAKVFDEFKPLVEEPQNLIKQNCELFEQLGEYKFQNALLVRYTKKVPQVSTPTLVEVSRNLGKVGSKCCKHPEAKRMPCAEDYLSVVLNQLCVLHEKTPVSDRVTKCCTESLVNRRPCFSALEVDETYVPKEFNAETFTFHADICTLSEKERQIKKQTALVELVKHKPKATKEQLKAVMDDFAAFVEKCCKADDKETCFAEEGKKLVAASQAALGL

SEQ ID NO: 219 - protein, 646 aa, Homo sapiens
MKWVSFISLLFLFSSAYSRSLDKRDAHKSEVAHRFKDLGEENFKALVLIAFAQYLQQCPFEDHVKLVNEVTEFAKTCVADESAENCDKSLHTLFGDKLCTVATLRETYGEMADCCAKQEPERNECFLQHKDDNPNLPRLVRPEVDVMCTAFHDNEETFLKKYLYEIARRHPYFYAPELLFFAKRYKAAFTECCQAADKAACLLPKLDELRDEGKASSAKQRLKCASLQKFGERAFKAWAVARLSQRFPKAEFAEVSKLVTDLTKVHTECCHGDLLECADDRADLAKYICENQDSISSKLKECCEKPLLEKSHCIAEVENDEMPADLPSLAADFVESKDVCKNYAEAKDVFLGMFLYEYARRHPDYSVVLLLRLAKTYETTLEKCCAAADPHECYAKVFDEFKPLVEEPQNLIKQNCELFEQLGEYKFQNALLVRYTKKVPQVSTPTLVEVSRNLGKVGSKCCKHPEAKRMPCAEDYLSVVLNQLCVLHEKTPVSDRVTKCCTESLVNRRPCFSALEVDETYVPKEFNAETFTFHADICTLSEKERQIKKQTALVELVKHKPKATKEQLKAVMDDFAAFVEKCCKADDKETCFAEEGKKLVAASQAALGLEVVPPQVLSEPNEEAGAALSPLPEVPPWTGEVSPAQR

SEQ ID NO: 220 - protein, 629 aa, Homo sapiens
MKWVSFISLLFLFSSAYSRSLDKRSSDRSALLKSKLRALLTAPRDAHKSEVAHRFKDLGEENFKALVLIAFAQYLQQCPFEDHVKLVNEVTEFAKTCVADESAENCDKSLHTLFGDKLCTVATLRETYGEMADCCAKQEPERNECFLQHKDDNPNLPRLVRPEVDVMCTAFHDNEETFLKKYLYEIARRHPYFYAPELLFFAKRYKAAFTECCQAADKAACLLPKLDELRDEGKASSAKQRLKCASLQKFGERAFKAWAVARLSQRFPKAEFAEVSKLVTDLTKVHTECCHGDLLECADDRADLAKYICENQDSISSKLKECCEKPLLEKSHCIAEVENDEMPADLPSLAADFVESKDVCKNYAEAKDVFLGMFLYEYARRHPDYSVVLLLRLAKTYETTLEKCCAAADPHECYAKVFDEFKPLVEEPQNLIKQNCELFEQLGEYKFQNALLVRYTKKVPQVSTPTLVEVSRNLGKVGSKCCKHPEAKRMPCAEDYLSVVLNQLCVLHEKTPVSDRVTKCCTESLVNRRPCFSALEVDETYVPKEFNAETFTFHADICTLSEKERQIKKQTALVELVKHKPKATKEQLKAVMDDFAAFVEKCCKADDKETCFAEEGKKLVAASQAALGL

SEQ ID NO: 221 - protein, 629 aa, Homo sapiens
MKWVSFISLLFLFSSAYSRSLDKRDAHKSEVAHRFKDLGEENFKALVLIAFAQYLQQCPFEDHVKLVNEVTEFAKTCVADESAENCDKSLHTLFGDKLCTVATLRETYGEMADCCAKQEPERNECFLQHKDDNPNLPRLVRPEVDVMCTAFHDNEETFLKKYLYEIARRHPYFYAPELLFFAKRYKAAFTECCQAADKAACLLPKLDELRDEGKASSAKQRLKCASLQKFGERAFKAWAVARLSQRFPKAEFAEVSKLVTDLTKVHTECCHGDLLECADDRADLAKYICENQDSISSKLKECCEKPLLEKSHCIAEVENDEMPADLPSLAADFVESKDVCKNYAEAKDVFLGMFLYEYARRHPDYSVVLLLRLAKTYETTLEKCCAAADPHECYAKVFDEFKPLVEEPQNLIKQNCELFEQLGEYKFQNALLVRYTKKVPQVSTPTLVEVSRNLGKVGSKCCKHPEAKRMPCAEDYLSVVLNQLCVLHEKTPVSDRVTKCCTESLVNRRPCFSALEVDETYVPKEFNAETFTFHADICTLSEKERQIKKQTALVELVKHKPKATKEQLKAVMDDFAAFVEKCCKADDKETCFAEEGKKLVAASQAALGLSSDRSALLKSKLRALLTAPR

SEQ ID NO: 222 - protein, 631 aa, Homo sapiens
MKWVSFISLLFLFSSAYSRSLDKRGLSKGCFGLKLDRIGSMSGLGCDAHKSEVAHRFKDLGEENFKALVLIAFAQYLQQCPFEDHVKLVNEVTEFAKTCVADESAENCDKSLHTLFGDKLCTVATLRETYGEMADCCAKQEPERNECFLQHKDDNPNLPRLVRPEVDVMCTAFHDNEETFLKKYLYEIARRHPYFYAPELLFFAKRYKAAFTECCQAADKAACLLPKLDELRDEGKASSAKQRLKCASLQKFGERAFKAWAVARLSQRFPKAEFAEVSKLVTDLTKVHTECCHGDLLECADDRADLAKYICENQDSISSKLKECCEKPLLEKSHCIAEVENDEMPADLPSLAADFVESKDVCKNYAEAKDVFLGMFLYEYARRHPDYSVVLLLRLAKTYETTLEKCCAAADPHECYAKVFDEFKPLVEEPQNLIKQNCELFEQLGEYKFQNALLVRYTKKVPQVSTPTLVEVSRNLGKVGSKCCKHPEAKRMPCAEDYLSVVLNQLCVLHEKTPVSDRVTKCCTESLVNRRPCFSALEVDETYVPKEFNAETFTFHADICTLSEKERQIKKQTALVELVKHKPKATKEQLKAVMDDFAAFVEKCCKADDKETCFAEEGKKLVAASQAALGL

SEQ ID NO: 223 - protein, 631 aa, Homo sapiens
MKWVSFISLLFLFSSAYSRSLDKRDAHKSEVAHRFKDLGEENFKALVLIAFAQYLQQCPFEDHVKLVNEVTEFAKTCVADESAENCDKSLHTLFGDKLCTVATLRETYGEMADCCAKQEPERNECFLQHKDDNPNLPRLVRPEVDVMCTAFHDNEETFLKKYLYEIARRHPYFYAPELLFFAKRYKAAFTECCQAADKAACLLPKLDELRDEGKASSAKQRLKCASLQKFGERAFKAWAVARLSQRFPKAEFAEVSKLVTDLTKVHTECCHGDLLECADDRADLAKYICENQDSISSKLKECCEKPLLEKSHCIAEVENDEMPADLPSLAADFVESKDVCKNYAEAKDVFLGMFLYEYARRHPDYSVVLLLRLAKTYETTLEKCCAAADPHECYAKVFDEFKPLVEEPQNLIKQNCELFEQLGEYKFQNALLVRYTKKVPQVSTPTLVEVSRNLGKVGSKCCKHPEAKRMPCAEDYLSVVLNQLCVLHEKTPVSDRVTKCCTESLVNRRPCFSALEVDETYVPKEFNAETFTFHADICTLSEKERQIKKQTALVELVKHKPKATKEQLKAVMDDFAAFVEKCCKADDKETCFAEEGKKLVAASQAALGLGLSKGCFGLKLDRIGSMSGLGC

SEQ ID NO: 224 - protein, 647 aa, Homo sapiens
MKWVSFISLLFLFSSAYSRSLDKREVKYDPCFGHKIDRINHVSNLGCPSLRDPRPNAPSTSADAHKSEVAHRFKDLGEENFKALVLIAFAQYLQQCPFEDHVKLVNEVTEFAKTCVADESAENCDKSLHTLFGDKLCTVATLRETYGEMADCCAKQEPERNECFLQHKDDNPNLPRLVRPEVDVMCTAFHDNEETFLKKYLYEIARRHPYFYAPELLFFAKRYKAAFTECCQAADKAACLLPKLDELRDEGKASSAKQRLKCASLQKFGERAFKAWAVARLSQRFPKAEFAEVSKLVTDLTKVHTECCHGDLLECADDRADLAKYICENQDSISSKLKECCEKPLLEKSHCIAEVENDEMPADLPSLAADFVESKDVCKNYAEAKDVFLGMFLYEYARRHPDYSVVLLLRLAKTYETTLEKCCAAADPHECYAKVFDEFKPLVEEPQNLIKQNCELFEQLGEYKFQNALLVRYTKKVPQVSTPTLVEVSRNLGKVGSKCCKHPEAKRMPCAEDYLSVVLNQLCVLHEKTPVSDRVTKCCTESLVNRRPCFSALEVDETYVPKEFNAETFTFHADICTLSEKERQIKKQTALVELVKHKPKATKEQLKAVMDDFAAFVEKCCKADDKETCFAEEGKKLVAASQAALGL

SEQ ID NO: 225 - protein, 647 aa, Homo sapiens
MKWVSFISLLFLFSSAYSRSLDKRDAHKSEVAHRFKDLGEENFKALVLIAFAQYLQQCPFEDHVKLVNEVTEFAKTCVADESAENCDKSLHTLFGDKLCTVATLRETYGEMADCCAKQEPERNECFLQHKDDNPNLPRLVRPEVDVMCTAFHDNEETFLKKYLYEIARRHPYFYAPELLFFAKRYKAAFTECCQAADKAACLLPKLDELRDEGKASSAKQRLKCASLQKFGERAFKAWAVARLSQRFPKAEFAEVSKLVTDLTKVHTECCHGDLLECADDRADLAKYICENQDSISSKLKECCEKPLLEKSHCIAEVENDEMPADLPSLAADFVESKDVCKNYAEAKDVFLGMFLYEYARRHPDYSVVLLLRLAKTYETTLEKCCAAADPHECYAKVFDEFKPLVEEPQNLIKQNCELFEQLGEYKFQNALLVRYTKKVPQVSTPTLVEVSRNLGKVGSKCCKHPEAKRMPCAEDYLSVVLNQLCVLHEKTPVSDRVTKCCTESLVNRRPCFSALEVDETYVPKEFNAETFTFHADICTLSEKERQIKKQTALVELVKHKPKATKEQLKAVMDDFAAFVEKCCKADDKETCFAEEGKKLVAASQAALGLEVKYDPCFGHKIDRINHVSNLGCPSLRDPRPNAPSTSA

SEQ ID NO: 226 - protein, 670 aa, Homo sapiens [sequence omitted]

SEQ ID NO: 227 - protein, 637 aa, Homo sapiens
MKWVSFISLLFLFSSAYSRSLDKRSLRRSSCFGGRMDRIGAQSGLGCNSFRYDAHKSEVAHRFKDLGEENFKALVLIAFAQYLQQCPFEDHVKLVNEVTEFAKTCVADESAENCDKSLHTLFGDKLCTVATLRETYGEMADCCAKQEPERNECFLQHKDDNPNLPRLVRPEVDVMCTAFHDNEETFLKKYLYEIARRHPYFYAPELLFFAKRYKAAFTECCQAADKAACLLPKLDELRDEGKASSAKQRLKCASLQKFGERAFKAWAVARLSQRFPKAEFAEVSKLVTDLTKVHTECCHGDLLECADDRADLAKYICENQDSISSKLKECCEKPLLEKSHCIAEVENDEMPADLPSLAADFVESKDVCKNYAEAKDVFLGMFLYEYARRHPDYSVVLLLRLAKTYETTLEKCCAAADPHECYAKVFDEFKPLVEEPQNLIKQNCELFEQLGEYKFQNALLVRYTKKVPQVSTPTLVEVSRNLGKVGSKCCKHPEAKRMPCAEDYLSVVLNQLCVLHEKTPVSDRVTKCCTESLVNRRPCFSALEVDETYVPKEFNAETFTFHADICTLSEKERQIKKQTALVELVKHKPKATKEQLKAVMDDFAAFVEKCCKADDKETCFAEEGKKLVAASQAALGL

SEQ ID NO: 228 - protein, 683 aa, Homo sapiens
MKWVSFISLLFLFSSAYSRSLDKRTKTESSSRGPYHPSECCFTYTTYKIPRQRIMDYYETNSQCSKPGIVFITKRGHSVCTNPSDKWVQDYIKDMKENDAHKSEVAHRFKDLGEENFKALVLIAFAQYLQQCPFEDHVKLVNEVTEFAKTCVADESAENCDKSLHTLFGDKLCTVATLRETYGEMADCCAKQEPERNECFLQHKDDNPNLPRLVRPEVDVMCTAFHDNEETFLKKYLYEIARRHPYFYAPELLFFAKRYKAAFTECCQAADKAACLLPKLDELRDEGKASSAKQRLKCASLQKFGERAFKAWAVARLSQRFPKAEFAEVSKLVTDLTKVHTECCHGDLLECADDRADLAKYICENQDSISSKLKECCEKPLLEKSHCIAEVENDEMPADLPSLAADFVESKDVCKNYAEAKDVFLGMFLYEYARRHPDYSVVLLLRLAKTYETTLEKCCAAADPHECYAKVFDEFKPLVEEPQNLIKQNCELFEQLGEYKFQNALLVRYTKKVPQVSTPTLVEVSRNLGKVGSKCCKHPEAKRMPCAEDYLSVVLNQLCVLHEKTPVSDRVTKCCTESLVNRRPCFSALEVDETYVPKEFNAETFTFHADICTLSEKERQIKKQTALVELVKHKPKATKEQLKAVMDDFAAFVEKCCKADDKETCFAEEGKKLVAASQAALGL

SEQ ID NO: 229 - protein, 683 aa, Homo sapiens; identical to SEQ ID NO: 228

SEQ ID NO: 230 - protein, 675 aa, Homo sapiens
MKWVSFISLLFLFSSAYSRSLDKRGPYHPSECCFTYTTYKIPRQRIMDYYETNSQCSKPGIVFITKRGHSVCTNPSDKWVQDYIKDMKENDAHKSEVAHRFKDLGEENFKALVLIAFAQYLQQCPFEDHVKLVNEVTEFAKTCVADESAENCDKSLHTLFGDKLCTVATLRETYGEMADCCAKQEPERNECFLQHKDDNPNLPRLVRPEVDVMCTAFHDNEETFLKKYLYEIARRHPYFYAPELLFFAKRYKAAFTECCQAADKAACLLPKLDELRDEGKASSAKQRLKCASLQKFGERAFKAWAVARLSQRFPKAEFAEVSKLVTDLTKVHTECCHGDLLECADDRADLAKYICENQDSISSKLKECCEKPLLEKSHCIAEVENDEMPADLPSLAADFVESKDVCKNYAEAKDVFLGMFLYEYARRHPDYSVVLLLRLAKTYETTLEKCCAAADPHECYAKVFDEFKPLVEEPQNLIKQNCELFEQLGEYKFQNALLVRYTKKVPQVSTPTLVEVSRNLGKVGSKCCKHPEAKRMPCAEDYLSVVLNQLCVLHEKTPVSDRVTKCCTESLVNRRPCFSALEVDETYVPKEFNAETFTFHADICTLSEKERQIKKQTALVELVKHKPKATKEQLKAVMDDFAAFVEKCCKADDKETCFAEEGKKLVAASQAALGL

SEQ ID NO: 231 - protein, 675 aa, Homo sapiens; identical to SEQ ID NO: 230

SEQ ID NO: 232 - protein, 691 aa, Homo sapiens
MKWVSFISLLFLFSSAYSRSLDKRGPYHPSECCFTYTTYKIPRQRIMDYYETNSQCSKPGIVFITKRGHSVCTNPSDKWVQDYIKDMKENSGGGGSGGGGSGGGGSDAHKSEVAHRFKDLGEENFKALVLIAFAQYLQQCPFEDHVKLVNEVTEFAKTCVADESAENCDKSLHTLFGDKLCTVATLRETYGEMADCCAKQEPERNECFLQHKDDNPNLPRLVRPEVDVMCTAFHDNEETFLKKYLYEIARRHPYFYAPELLFFAKRYKAAFTECCQAADKAACLLPKLDELRDEGKASSAKQRLKCASLQKFGERAFKAWAVARLSQRFPKAEFAEVSKLVTDLTKVHTECCHGDLLECADDRADLAKYICENQDSISSKLKECCEKPLLEKSHCIAEVENDEMPADLPSLAADFVESKDVCKNYAEAKDVFLGMFLYEYARRHPDYSVVLLLRLAKTYKTTLEKCCAAADPHECYAKVFDEFKPLVEEPQNLIKQNCELFEQLGEYKFQNALLVRYTKKVPQVSTPTLVEVSRNLGKVGSKCCKHPEAKRMPCAEDYLSVVLNQLCVLHEKTPVSDRVTKCCTESLVNRRPCFSALEVDETYVPKEFNAETFTFHADICTLSEKERQIKKQTALVELVKHKPKATKEQLKAVMDDFAAFVEKCCKADDKETCFAEEGKKLVAASQAALGL

SEQ ID NO: 233 - protein, 675 aa, Homo sapiens
MKWVTFISLLFLFSSAYSRGVFRRGPYHPSECCFTYTTYKIPRQRIMDYYETNSQCSKPGIVFITKRGHSVCTNPSDKWVQDYIKDMKENDAHKSEVAHRFKDLGEENFKALVLIAFAQYLQQCPFEDHVKLVNEVTEFAKTCVADESAENCDKSLHTLFGDKLCTVATLRETYGEMADCCAKQEPERNECFLQHKDDNPNLPRLVRPEVDVMCTAFHDNEETFLKKYLYEIARRHPYFYAPELLFFAKRYKAAFTECCQAADKAACLLPKLDELRDEGKASSAKQRLKCASLQKFGERAFKAWAVARLSQRFPKAEFAEVSKLVTDLTKVHTECCHGDLLECADDRADLAKYICENQDSISSKLKECCEKPLLEKSHCIAEVENDEMPADLPSLAADFVESKDVCKNYAEAKDVFLGMFLYEYARRHPDYSVVLLLRLAKTYETTLEKCCAAADPHECYAKVFDEFKPLVEEPQNLIKQNCELFEQLGEYKFQNALLVRYTKKVPQVSTPTLVEVSRNLGKVGSKCCKHPEAKRMPCAEDYLSVVLNQLCVLHEKTPVSDRVTKCCTESLVNRRPCFSALEVDETYVPKEFNAETFTFHADICTLSEKERQIKKQTALVELVKHKPKATKEQLKAVMDDFAAFVEKCCKADDKETCFAEEGKKLVAASQAALGL

SEQ ID NO: 234 - protein, 736 aa, Homo sapiens
MRFPSIFTAVLFAASSALAAPVNTTTEDETAQIPAEAVIGYSDLEGDFDVAVLPFSNSTNNGLLFINTTIASIAAKEEGVSLDKRGPYHPSECCFTYTTYKIPRQRIMDYYETNSQCSKPGIVFITKRGHSVCTNPSDKWVQDYIKDMKENDAHKSEVAHRFKDLGEENFKALVLIAFAQYLQQCPFEDHVKLVNEVTEFAKTCVADESAENCDKSLHTLFGDKLCTVATLRETYGEMADCCAKQEPERNECFLQHKDDNPNLPRLVRPEVDVMCTAFHDNEETFLKKYLYEIARRHPYFYAPELLFFAKRYKAAFTECCQAADKAACLLPKLDELRDEGKASSAKQRLKCASLQKFGERAFKAWAVARLSQRFPKAEFAEVSKLVTDLTKVHTECCHGDLLECADDRADLAKYICENQDSISSKLKECCEKPLLEKSHCIAEVENDEMPADLPSLAADFVESKDVCKNYAEAKDVFLGMFLYEYARRHPDYSVVLLLRLAKTYETTLEKCCAAADPHECYAKVFDEFKPLVEEPQNLIKQNCELFEQLGEYKFQNALLVRYTKKVPQVSTPTLVEVSRNLGKVGSKCCKHPEAKRMPCAEDYLSVVLNQLCVLHEKTPVSDRVTKCCTESLVNRRPCFSALEVDETYVPKEFNAETFTFHADICTLSEKERQIKKQTALVELVKHKPKATKEQLKAVMDDFAAFVEKCCKADDKETCFAEEGKKLVAASQAALGL

SEQ ID NO: 235 - protein, 669 aa, Homo sapiens
MKWVSFISLLFLFSSAYSGPYHPSECCFTYTTYKIPRQRIMDYYETNSQCSKPGIVFITKRGHSVCTNPSDKWVQDYIKDMKENDAHKSEVAHRFKDLGEENFKALVLIAFAQYLQQCPFEDHVKLVNEVTEFAKTCVADESAENCDKSLHTLFGDKLCTVATLRETYGEMADCCAKQEPERNECFLQHKDDNPNLPRLVRPEVDVMCTAFHDNEETFLKKYLYEIARRHPYFYAPELLFFAKRYKAAFTECCQAADKAACLLPKLDELRDEGKASSAKQRLKCASLQKFGERAFKAWAVARLSQRFPKAEFAEVSKLVTDLTKVHTECCHGDLLECADDRADLAKYICENQDSISSKLKECCEKPLLEKSHCIAEVENDEMPADLPSLAADFVESKDVCKNYAEAKDVFLGMFLYEYARRHPDYSVVLLLRLAKTYETTLEKCCAAADPHECYAKVFDEFKPLVEEPQNLIKQNCELFEQLGEYKFQNALLVRYTKKVPQVSTPTLVEVSRNLGKVGSKCCKHPEAKRMPCAEDYLSVVLNQLCVLHEKTPVSDRVTKCCTESLVNRRPCFSALEVDETYVPKEFNAETFTFHADICTLSEKERQIKKQTALVELVKHKPKATKEQLKAVMDDFAAFVEKCCKADDKETCFAEEGKKLVAASQAALGL

SEQ ID NO: 236 - protein, 670 aa, Homo sapiens
MLLQAFLFLLAGFAAKISAGPYHPSECCFTYTTYKIPRQRIMDYYETNSQCSKPGIVFITKRGHSVCTNPSDKWVQDYIKDMKENDAHKSEVAHRFKDLGEENFKALVLIAFAQYLQQCPFEDHVKLVNEVTEFAKTCVADESAENCDKSLHTLFGDKLCTVATLRETYGEMADCCAKQEPERNECFLQHKDDNPNLPRLVRPEVDVMCTAFHDNEETFLKKYLYEIARRHPYFYAPELLFFAKRYKAAFTECCQAADKAACLLPKLDELRDEGKASSAKQRLKCASLQKFGERAFKAWAVARLSQRFPKAEFAEVSKLVTDLTKVHTECCHGDLLECADDRADLAKYICENQDSISSKLKECCEKPLLEKSHCIAEVENDEMPADLPSLAADFVESKDVCKNYAEAKDVFLGMFLYEYARRHPDYSVVLLLRLAKTYETTLEKCCAAADPHECYAKVFDEFKPLVEEPQNLIKQNCELFEQLGEYKFQNALLVRYTKKVPQVSTPTLVEVSRNLGKVGSKCCKHPEAKRMPCAEDYLSVVLNQLCVLHEKTPVSDRVTKCCTESLVNRRPCFSALEVDETYVPKEFNAETFTFHADICTLSEKERQIKKQTALVELVKHKPKATKEQLKAVMDDFAAFVEKCCKADDKETCFAEEGKKLVAASQAALGL

SEQ ID NO: 237 - protein, 682 aa, Homo sapiens
MKWVSFISLLFLFSSAYSRSLDKRKTESSSRGPYHPSECCFTYTTYKIPRQRIMDYYETNSQCSKPGIVFITKRGHSVCTNPSDKWVQDYIKDMKENDAHKSEVAHRFKDLGEENFKALVLIAFAQYLQQCPFEDHVKLVNEVTEFAKTCVADESAENCDKSLHTLFGDKLCTVATLRETYGEMADCCAKQEPERNECFLQHKDDNPNLPRLVRPEVDVMCTAFHDNEETFLKKYLYEIARRHPYFYAPELLFFAKRYKAAFTECCQAADKAACLLPKLDELRDEGKASSAKQRLKCASLQKFGERAFKAWAVARLSQRFPKAEFAEVSKLVTDLTKVHTECCHGDLLECADDRADLAKYICENQDSISSKLKECCEKPLLEKSHCIAEVENDEMPADLPSLAADFVESKDVCKNYAEAKDVFLGMFLYEYARRHPDYSVVLLLRLAKTYETTLEKCCAAADPHECYAKVFDEFKPLVEEPQNLIKQNCELFEQLGEYKFQNALLVRYTKKVPQVSTPTLVEVSRNLGKVGSKCCKHPEAKRMPCAEDYLSVVLNQLCVLHEKTPVSDRVTKCCTESLVNRRPCFSALEVDETYVPKEFNAETFTFHADICTLSEKERQIKKQTALVELVKHKPKATKEQLKAVMDDFAAFVEKCCKADDKETCFAEEGKKLVAASQAALGL

SEQ ID NO: 238 - protein, 681 aa, Homo sapiens
MKWVSFISLLFLFSSAYSRSLDKRTESSSRGPYHPSECCFTYTTYKIPRQRIMDYYETNSQCSKPGIVFITKRGHSVCTNPSDKWVQDYIKDMKENDAHKSEVAHRFKDLGEENFKALVLIAFAQYLQQCPFEDHVKLVNEVTEFAKTCVADESAENCDKSLHTLFGDKLCTVATLRETYGEMADCCAKQEPERNECFLQHKDDNPNLPRLVRPEVDVMCTAFHDNEETFLKKYLYEIARRHPYFYAPELLFFAKRYKAAFTECCQAADKAACLLPKLDELRDEGKASSAKQRLKCASLQKFGERAFKAWAVARLSQRFPKAEFAEVSKLVTDLTKVHTECCHGDLLECADDRADLAKYICENQDSISSKLKECCEKPLLEKSHCIAEVENDEMPADLPSLAADFVESKDVCKNYAEAKDVFLGMFLYEYARRHPDYSVVLLLRLAKTYETTLEKCCAAADPHECYAKVFDEFKPLVEEPQNLIKQNCELFEQLGEYKFQNALLVRYTKKVPQVSTPTLVEVSRNLGKVGSKCCKHPEAKRMPCAEDYLSVVLNQLCVLHEKTPVSDRVTKCCTESLVNRRPCFSALEVDETYVPKEFNAETFTFHADICTLSEKERQIKKQTALVELVKHKPKATKEQLKAVMDDFAAFVEKCCKADDKETCFAEEGKKLVAASQAALGL

SEQ ID NO: 239 - protein, 680 aa, Homo sapiens
MKWVSFISLLFLFSSAYSRSLDKRESSSRGPYHPSECCFTYTTYKIPRQRIMDYYETNSQCSKPGIVFITKRGHSVCTNPSDKWVQDYIKDMKENDAHKSEVAHRFKDLGEENFKALVLIAFAQYLQQCPFEDHVKLVNEVTEFAKTCVADESAENCDKSLHTLFGDKLCTVATLRETYGEMADCCAKQEPERNECFLQHKDDNPNLPRLVRPEVDVMCTAFHDNEETFLKKYLYEIARRHPYFYAPELLFFAKRYKAAFTECCQAADKAACLLPKLDELRDEGKASSAKQRLKCASLQKFGERAFKAWAVARLSQRFPKAEFAEVSKLVTDLTKVHTECCHGDLLECADDRADLAKYICENQDSISSKLKECCEKPLLEKSHCIAEVENDEMPADLPSLAADFVESKDVCKNYAEAKDVFLGMFLYEYARRHPDYSVVLLLRLAKTYETTLEKCCAAADPHECYAKVFDEFKPLVEEPQNLIKQNCELFEQLGEYKFQNALLVRYTKKVPQVSTPTLVEVSRNLGKVGSKCCKHPEAKRMPCAEDYLSVVLNQLCVLHEKTPVSDRVTKCCTESLVNRRPCFSALEVDETYVPKEFNAETFTFHADICTLSEKERQIKKQTALVELVKHKPKATKEQLKAVMDDFAAFVEKCCKADDKETCFAEEGKKLVAASQAALGL

SEQ ID NO: 240 - protein, 679 aa, Homo sapiens
MKWVSFISLLFLFSSAYSRSLDKRSSSRGPYHPSECCFTYTTYKIPRQRIMDYYETNSQCSKPGIVFITKRGHSVCTNPSDKWVQDYIKDMKENDAHKSEVAHRFKDLGEENFKALVLIAFAQYLQQCPFEDHVKLVNEVTEFAKTCVADESAENCDKSLHTLFGDKLCTVATLRETYGEMADCCAKQEPERNECFLQHKDDNPNLPRLVRPEVDVMCTAFHDNEETFLKKYLYEIARRHPYFYAPELLFFAKRYKAAFTECCQAADKAACLLPKLDELRDEGKASSAKQRLKCASLQKFGERAFKAWAVARLSQRFPKAEFAEVSKLVTDLTKVHTECCHGDLLECADDRADLAKYICENQDSISSKLKECCEKPLLEKSHCIAEVENDEMPADLPSLAADFVESKDVCKNYAEAKDVFLGMFLYEYARRHPDYSVVLLLRLAKTYETTLEKCCAAADPHECYAKVFDEFKPLVEEPQNLIKQNCELFEQLGEYKFQNALLVRYTKKVPQVSTPTLVEVSRNLGKVGSKCCKHPEAKRMPCAEDYLSVVLNQLCVLHEKTPVSDRVTKCCTESLVNRRPCFSALEVDETYVPKEFNAETFTFHADICTLSEKERQIKKQTALVELVKHKPKATKEQLKAVMDDFAAFVEKCCKADDKETCFAEEGKKLVAASQAALGL

SEQ ID NO: 241 - protein, 678 aa, Homo sapiens
MKWVSFISLLFLFSSAYSRSLDKRSSRGPYHPSECCFTYTTYKIPRQRIMDYYETNSQCSKPGIVFITKRGHSVCTNPSDKWVQDYIKDMKENDAHKSEVAHRFKDLGEENFKALVLIAFAQYLQQCPFEDHVKLVNEVTEFAKTCVADESAENCDKSLHTLFGDKLCTVATLRETYGEMADCCAKQEPERNECFLQHKDDNPNLPRLVRPEVDVMCTAFHDNEETFLKKYLYEIARRHPYFYAPELLFFAKRYKAAFTECCQAADKAACLLPKLDELRDEGKASSAKQRLKCASLQKFGERAFKAWAVARLSQRFPKAEFAEVSKLVTDLTKVHTECCHGDLLECADDRADLAKYICENQDSISSKLKECCEKPLLEKSHCIAEVENDEMPADLPSLAADFVESKDVCKNYAEAKDVFLGMFLYEYARRHPDYSVVLLLRLAKTYETTLEKCCAAADPHECYAKVFDEFKPLVEEPQNLIKQNCELFEQLGEYKFQNALLVRYTKKVPQVSTPTLVEVSRNLGKVGSKCCKHPEAKRMPCAEDYLSVVLNQLCVLHEKTPVSDRVTKCCTESLVNRRPCFSALEVDETYVPKEFNAETFTFHADICTLSEKERQIKKQTALVELVKHKPKATKEQLKAVMDDFAAFVEKCCKADDKETCFAEEGKKLVAASQAALGL

SEQ ID NO: 242 - protein, 677 aa, Homo sapiens
MKWVSFISLLFLFSSAYSRSLDKRSRGPYHPSECCFTYTTYKIPRQRIMDYYETNSQCSKPGIVFITKRGHSVCTNPSDKWVQDYIKDMKENDAHKSEVAHRFKDLGEENFKALVLIAFAQYLQQCPFEDHVKLVNEVTEFAKTCVADESAENCDKSLHTLFGDKLCTVATLRETYGEMADCCAKQEPERNECFLQHKDDNPNLPRLVRPEVDVMCTAFHDNEETFLKKYLYEIARRHPYFYAPELLFFAKRYKAAFTECCQAADKAACLLPKLDELRDEGKASSAKQRLKCASLQKFGERAFKAWAVARLSQRFPKAEFAEVSKLVTDLTKVHTECCHGDLLECADDRADLAKYICENQDSISSKLKECCEKPLLEKSHCIAEVENDEMPADLPSLAADFVESKDVCKNYAEAKDVFLGMFLYEYARRHPDYSVVLLLRLAKTYETTLEKCCAAADPHECYAKVFDEFKPLVEEPQNLIKQNCELFEQLGEYKFQNALLVRYTKKVPQVSTPTLVEVSRNLGKVGSKCCKHPEAKRMPCAEDYLSVVLNQLCVLHEKTPVSDRVTKCCTESLVNRRPCFSALEVDETYVPKEFNAETFTFHADICTLSEKERQIKKQTALVELVKHKPKATKEQLKAVMDDFAAFVEKCCKADDKETCFAEEGKKLVAASQAALGL

SEQ ID NO: 243 - protein, 676 aa, Homo sapiens
MKWVSFISLLFLFSSAYSRSLDKRRGPYHPSECCFTYTTYKIPRQRIMDYYETNSQCSKPGIVFITKRGHSVCTNPSDKWVQDYIKDMKENDAHKSEVAHRFKDLGEENFKALVLIAFAQYLQQCPFEDHVKLVNEVTEFAKTCVADESAENCDKSLHTLFGDKLCTVATLRETYGEMADCCAKQEPERNECFLQHKDDNPNLPRLVRPEVDVMCTAFHDNEETFLKKYLYEIARRHPYFYAPELLFFAKRYKAAFTECCQAADKAACLLPKLDELRDEGKASSAKQRLKCASLQKFGERAFKAWAVARLSQRFPKAEFAEVSKLVTDLTKVHTECCHGDLLECADDRADLAKYICENQDSISSKLKECCEKPLLEKSHCIAEVENDEMPADLPSLAADFVESKDVCKNYAEAKDVFLGMFLYEYARRHPDYSVVLLLRLAKTYETTLEKCCAAADPHECYAKVFDEFKPLVEEPQNLIKQNCELFEQLGEYKFQNALLVRYTKKVPQVSTPTLVEVSRNLGKVGSKCCKHPEAKRMPCAEDYLSVVLNQLCVLHEKTPVSDRVTKCCTESLVNRRPCFSALEVDETYVPKEFNAETFTFHADICTLSEKERQIKKQTALVELVKHKPKATKEQLKAVMDDFAAFVEKCCKADDKETCFAEEGKKLVAASQAALGL

SEQ ID NO: 244 - protein, 674 aa, Homo sapiens
MKWVSFISLLFLFSSAYSRSLDKRPYHPSECCFTYTTYKIPRQRIMDYYETNSQCSKPGIVFITKRGHSVCTNPSDKWVQDYIKDMKENDAHKSEVAHRFKDLGEENFKALVLIAFAQYLQQCPFEDHVKLVNEVTEFAKTCVADESAENCDKSLHTLFGDKLCTVATLRETYGEMADCCAKQEPERNECFLQHKDDNPNLPRLVRPEVDVMCTAFHDNEETFLKKYLYEIARRHPYFYAPELLFFAKRYKAAFTECCQAADKAACLLPKLDELRDEGKASSAKQRLKCASLQKFGERAFKAWAVARLSQRFPKAEFAEVSKLVTDLTKVHTECCHGDLLECADDRADLAKYICENQDSISSKLKECCEKPLLEKSHCIAEVENDEMPADLPSLAADFVESKDVCKNYAEAKDVFLGMFLYEYARRHPDYSVVLLLRLAKTYETTLEKCCAAADPHECYAKVFDEFKPLVEEPQNLIKQNCELFEQLGEYKFQNALLVRYTKKVPQVSTPTLVEVSRNLGKVGSKCCKHPEAKRMPCAEDYLSVVLNQLCVLHEKTPVSDRVTKCCTESLVNRRPCFSALEVDETYVPKEFNAETFTFHADICTLSEKERQIKKQTALVELVKHKPKATKEQLKAVMDDFAAFVEKCCKADDKETCFAEEGKKLVAASQAALGL

SEQ ID NO: 245 - protein, 673 aa, Homo sapiens
MKWVSFISLLFLFSSAYSRSLDKRYHPSECCFTYTTYKIPRQRIMDYYETNSQCSKPGIVFITKRGHSVCTNPSDKWVQDYIKDMKENDAHKSEVAHRFKDLGEENFKALVLIAFAQYLQQCPFEDHVKLVNEVTEFAKTCVADESAENCDKSLHTLFGDKLCTVATLRETYGEMADCCAKQEPERNECFLQHKDDNPNLPRLVRPEVDVMCTAFHDNEETFLKKYLYEIARRHPYFYAPELLFFAKRYKAAFTECCQAADKAACLLPKLDELRDEGKASSAKQRLKCASLQKFGERAFKAWAVARLSQRFPKAEFAEVSKLVTDLTKVHTECCHGDLLECADDRADLAKYICENQDSISSKLKECCEKPLLEKSHCIAEVENDEMPADLPSLAADFVESKDVCKNYAEAKDVFLGMFLYEYARRHPDYSVVLLLRLAKTYETTLEKCCAAADPHECYAKVFDEFKPLVEEPQNLIKQNCELFEQLGEYKFQNALLVRYTKKVPQVSTPTLVEVSRNLGKVGSKCCKHPEAKRMPCAEDYLSVVLNQLCVLHEKTPVSDRVTKCCTESLVNRRPCFSALEVDETYVPKEFNAETFTFHADICTLSEKERQIKKQTALVELVKHKPKATKEQLKAVMDDFAAFVEKCCKADDKETCFAEEGKKLVAASQAALGL

SEQ ID NO: 246 - protein, 672 aa, Homo sapiens
MKVSVAALSCLMLVTALGSQAGPYHPSECCFTYTTYKIPRQRIMDYYETNSQCSKPGIVFITKRGHSVCTNPSDKWVQDYIKDMKENDAHKSEVAHRFKDLGEENFKALVLIAFAQYLQQCPFEDHVKLVNEVTEFAKTCVADESAENCDKSLHTLFGDKLCTVATLRETYGEMADCCAKQEPERNECFLQHKDDNPNLPRLVRPEVDVMCTAFHDNEETFLKKYLYEIARRHPYFYAPELLFFAKRYKAAFTECCQAADKAACLLPKLDELRDEGKASSAKQRLKCASLQKFGERAFKAWAVARLSQRFPKAEFAEVSKLVTDLTKVHTECCHGDLLECADDRADLAKYICENQDSISSKLKECCEKPLLEKSHCIAEVENDEMPADLPSLAADFVESKDVCKNYAEAKDVFLGMFLYEYARRHPDYSVVLLLRLAKTYETTLEKCCAAADPHECYAKVFDEFKPLVEEPQNLIKQNCELFEQLGEYKFQNALLVRYTKKVPQVSTPTLVEVSRNLGKVGSKCCKHPEAKRMPCAEDYLSVVLNQLCVLHEKTPVSDRVTKCCTESLVNRRPCFSALEVDETYVPKEFNAETFTFHADICTLSEKERQIKKQTALVELVKHKPKATKEQLKAVMDDFAAFVEKCCKADDKETCFAEEGKKLVAASQAALGL

SEQ ID NO: 247 - protein, 736 aa, Homo sapiens [sequence omitted]

SEQ ID NO: 248 - protein, 700 aa, Homo sapiens
MLLQAFLFLLAGFAAKISAGPYHPSECCFTYTTYKIPRQRIMDYYETNSQCSKPGIVFITKRGHSVCTNPSDKWVQDYIKDMKENHAEGTFTSDVSSYLEGQAAKEFIAWLVKGRDAHKSEVAHRFKDLGEENFKALVLIAFAQYLQQCPFEDHVKLVNEVTEFAKTCVADESAENCDKSLHTLFGDKLCTVATLRETYGEMADCCAKQEPERNECFLQHKDDNPNLPRLVRPEVDVMCTAFHDNEETFLKKYLYEIARRHPYFYAPELLFFAKRYKAAFTECCQAADKAACLLPKLDELRDEGKASSAKQRLKCASLQKFGERAFKAWAVARLSQRFPKAEFAEVSKLVTDLTKVHTECCHGDLLECADDRADLAKYICENQDSISSKLKECCEKPLLEKSHCIAEVENDEMPADLPSLAADFVESKDVCKNYAEAKDVFLGMFLYEYARRHPDYSVVLLLRLAKTYETTLEKCCAAADPHECYAKVFDEFKPLVEEPQNLIKQNCELFEQLGEYKFQNALLVRYTKKVPQVSTPTLVEVSRNLGKVGSKCCKHPEAKRMPCAEDYLSVVLNQLCVLHEKTPVSDRVTKCCTESLVNRRPCFSALEVDETYVPKEFNAETFTFHADICTLSEKERQIKKQTALVELVKHKPKATKEQLKAVMDDFAAFVEKCCKADDKETCFAEEGKKLVAASQAALGL

SEQ ID NO: 249 - protein, 686 aa, Homo sapiens
  SITE (580): Xaa equals any of the naturally occurring L-amino acids
MLLQAFLFLLAGFAAKISAGPYHPSECCFTYTTYKIPRQRIMDYYETNSQCSKPGIVFITKRGHSVCTNPSDKWVQDYIKDMKENSGGGGSGGGGSGGGGSDAHKSEVAHRFKDLGEENFKALVLIAFAQYLQQCPFEDHVKLVNEVTEFAKTCVADESAENCDKSLHTLFGDKLCTVATLRETYGEMADCCAKQEPERNECFLQHKDDNPNLPRLVRPEVDVMCTAFHDNEETFLKKYLYEIARRHPYFYAPELLFFAKRYKAAFTECCQAADKAACLLPKLDELRDEGKASSAKQRLKCASLQKFGERAFKAWAVARLSQRFPKAEFAEVSKLVTDLTKVHTECCHGDLLECADDRADLAKYICENQDSISSKLKECCEKPLLEKSHCIAEVENDEMPADLPSLAADFVESKDVCKNYAEAKDVFLGMFLYEYARRHPDYSVVLLLRLAKTYETTLEKCCAAADPHECYAKVFDEFKPLVEEPQNLIKQNCELFEQLGEYKFQNALLVRYTKKVPQVSTPTLVEVSRNLGKVGSKCCKHPEAKRMPCAEDYLSVVLNQLCVLHEKTPVSDRVTKCCTXSLVNRRPCFSALEVDETYVPKEFNAETFTFHADICTLSEKERQIKKQTALVELVKHKPKATKEQLKAVMDDFAAFVEKCCKADDKETCFAEEGKKLVAASQAALGL

SEQ ID NO: 250 - protein, 669 aa, Homo sapiens
MLLQAFLFLLAGFAAKISAPYHPSECCFTYTTYKIPRQRIMDYYETNSQCSKPGIVFITKRGHSVCTNPSDKWVQDYIKDMKENDAHKSEVAHRFKDLGEENFKALVLIAFAQYLQQCPFEDHVKLVNEVTEFAKTCVADESAENCDKSLHTLFGDKLCTVATLRETYGEMADCCAKQEPERNECFLQHKDDNPNLPRLVRPEVDVMCTAFHDNEETFLKKYLYEIARRHPYFYAPELLFFAKRYKAAFTECCQAADKAACLLPKLDELRDEGKASSAKQRLKCASLQKFGERAFKAWAVARLSQRFPKAEFAEVSKLVTDLTKVHTECCHGDLLECADDRADLAKYICENQDSISSKLKECCEKPLLEKSHCIAEVENDEMPADLPSLAADFVESKDVCKNYAEAKDVFLGMFLYEYARRHPDYSVVLLLRLAKTYETTLEKCCAAADPHECYAKVFDEFKPLVEEPQNLIKQNCELFEQLGEYKFQNALLVRYTKKVPQVSTPTLVEVSRNLGKVGSKCCKHPEAKRMPCAEDYLSVVLNQLCVLHEKTPVSDRVTKCCTESLVNRRPCFSALEVDETYVPKEFNAETFTFHADICTLSEKERQIKKQTALVELVKHKPKATKEQLKAVMDDFAACVEKCCKADDKETCFAEEGKKLVAASQAALGL

SEQ ID NO: 251 - protein, 671 aa, Homo sapiens
MLLQAFLFLLAGFAAKISARGPYHPSECCFTYTTYKIPRQRIMDYYETNSQCSKPGIVFITKRGHSVCTNPSDKWVQDYIKDMKENDAHKSEVAHRFKDLGEENFKALVLIAFAQYLQQCPFEDHVKLVNEVTEFAKTCVADESAENCDKSLHTLFGDKLCTVATLRETYGEMADCCAKQEPERNECFLQHKDDNPNLPRLVRPEVDVMCTAFHDNEETFLKKYLYEIARRHPYFYAPELLFFAKRYKAAFTECCQAADKAACLLPKLDELRDEGKASSAKQRLKCASLQKFGERAFKAWAVARLSQRFPKAEFAEVSKLVTDLTKVHTECCHGDLLECADDRADLAKYICENQDSISSKLKECCEKPLLEKSHCIAEVENDEMPADLPSLAADFVESKDVCKNYAEAKDVFLGMFLYEYARRHPDYSVVLLLRLAKTYETTLEKCCAAADPHECYAKVFDEFKPLVEEPQNLIKQNCELFEQLGEYKFQNALLVRYTKKVPQVSTPTLVEVSRNLGKVGSKCCKHPEAKRMPCAEDYLSVVLNQLCVLHEKTPVSDRVTKCCTESLVNRRPCFSALEVDETYVPKEFNAETFTFHADICTLSEKERQIKKQTALVELVKHKPKATKEQLKAVMDDFAAFVEKCCKADDKETCFAEEGKKLVAASQAALGL

SEQ ID NO: 252 - protein, 686 aa, Homo sapiens
MLLQAFLFLLAGFAAKISAGPYHPSECCFTYTTYKIPRQRIMDYYETNSQCSKPGIVFITKRGHSVCTNPSDKWVQDYIKDMKENDAHKSEVAHRFKDLGEDAHKSEVAHRFKDLGEENFKALVLIAFAQYLQQCPFEDHVKLVNEVTEFAKTCVADESAENCDKSLHTLFGDKLCTVATLRETYGEMADCCAKQEPERNECFLQHKDDNPNLPRLVRPEVDVMCTAFHDNEETFLKKYLYEIARRHPYFYAPELLFFAKRYKAAFTECCQAADKAACLLPKLDELRDEGKASSAKQRLKCASLQKFGERAFKAWAVARLSQRFPKAEFAEVSKLVTDLTKVHTECCHGDLLECADDRADLAKYICENQDSISSKLKECCEKPLLEKSHCIAEVENDEMPADLPSLAADFVESKDVCKNYAEAKDVFLGMFLYEYARRHPDYSVVLLLRLAKTYETTLEKCCAAADPHECYAKVFDEFKPLVEEPQNLIKQNCELFEQLGEYKFQNALLVRYTKKVPQVSTPTLVEVSRNLGKVGSKCCKHPEAKRMPCAEDYLSVVLNQLCVLHEKTPVSDRVTKCCTESLVNRRPCFSALEVDETYVPKEFNAETFTFHADICTLSEKERQIKKQTALVELVKHKPKATKEQLKAVMDDFAAFVEKCCKADDKETCFAEEGKKLVAASQAALGL

SEQ ID NO: 253 - protein, 672 aa, Homo sapiens
MLLQAFLFLLAGFAAKISAMRGPYHPSECCFTYTTYKIPRQRIMDYYETNSQCSKPGIVFITKRGHSVCTNPSDKWVQDYIKDMKENDAHKSEVAHRFKDLGEENFKALVLIAFAQYLQQCPFEDHVKLVNEVTEFAKTCVADESAENCDKSLHTLFGDKLCTVATLRETYGEMADCCAKQEPERNECFLQHKDDNPNLPRLVRPEVDVMCTAFHDNEETFLKKYLYEIARRHPYFYAPELLFFAKRYKAAFTECCQAADKAACLLPKLDELRDEGKASSAKQRLKCASLQKFGERAFKAWAVARLSQRFPKAEFAEVSKLVTDLTKVHTECCHGDLLECADDRADLAKYICENQDSISSKLKECCEKPLLEKSHCIAEVENDEMPADLPSLAADFVESKDVCKNYAEAKDVFLGMFLYEYARRHPDYSVVLLLRLAKTYETTLEKCCAAADPHECYAKVFDEFKPLVEEPQNLIKQNCELFEQLGEYKFQNALLVRYTKKVPQVSTPTLVEVSRNLGKVGSKCCKHPEAKRMPCAEDYLSVVLNQLCVLHEKTPVSDRVTKCCTESLVNRRPCFSALEVDETYVPKEFNAETFTFHADICTLSEKERQIKKQTALVELVKHKPKATKEQLKAVMDDFAAFVEKCCKADDKETCFAEEGKKLVAASQAALGL

SEQ ID NO: 254 - protein, 673 aa, Homo sapiens
MLLQAFLFLLAGFAAKISAMSRGPYHPSECCFTYTTYKIPRQRIMDYYETNSQCSKPGIVFITKRGHSVCTNPSDKWVQDYIKDMKENDAHKSEVAHRFKDLGEENFKALVLIAFAQYLQQCPFEDHVKLVNEVTEFAKTCVADESAENCDKSLHTLFGDKLCTVATLRETYGEMADCCAKQEPERNECFLQHKDDNPNLPRLVRPEVDVMCTAFHDNEETFLKKYLYEIARRHPYFYAPELLFFAKRYKAAFTECCQAADKAACLLPKLDELRDEGKASSAKQRLKCASLQKFGERAFKAWAVARLSQRFPKAEFAEVSKLVTDLTKVHTECCHGDLLECADDRADLAKYICENQDSISSKLKECCEKPLLEKSHCIAEVENDEMPADLPSLAADFVESKDVCKNYAEAKDVFLGMFLYEYARRHPDYSVVLLLRLAKTYETTLEKCCAAADPHECYAKVFDEFKPLVEEPQNLIKQNCELFEQLGEYKFQNALLVRYTKKVPQVSTPTLVEVSRNLGKVGSKCCKHPEAKRMPCAEDYLSVVLNQLCVLHEKTPVSDRVTKCCTESLVNRRPCFSALEVDETYVPKEFNAETFTFHADICTLSEKERQIKKQTALVELVKHKPKATKEQLKAVMDDFAAFVEKCCKADDKETCFAEEGKKLVAASQAALGL

SEQ ID NO: 255 - protein, 673 aa, Homo sapiens
MLLQAFLFLLAGFAAKISAMSSRGPYHPSECCFTYTTYKIPRQRIMDYYETNSQCSKPGIVFITKRGHSVCTNPSDKWVQDYIKDMKENDAHKSEVAHRFKDLGEENFKALVLIAFAQYLQQCPFEDHVKLVNEVTEFAKTCVADESAENCDKSLHTLFGDKLCTVATLRETYGEMADCCAKQEPERNECFLQHKDDNPNLPRLVRPEVDVMCTAFHDNEETFLKKYLYEIARRHPYFYAPELLFFAKRYKAAFTECCQAADKAACLLPKLDELRDEGKASSAKQRLKCASLQKFGERAFKAWAVARLSQRFPKAEFAEVSKLVTDLTKVHTECCHGDLLECADDRADLAKYICENQDSISSKLKECCEKPLLEKSHCIAEVENDEMPADLPSLAADFVESKDVCKNYAEAKDVFLGMFLYEYARRHPDYSVVLLLRLAKTYETTLEKCCAAADPHECYAKVFDEFKPLVEEPQNLIKQNCELFEQLGEYKFQNALLVRYTKKVPQVSTPTLVVSRNLGKVGSKCCKHPEAKRMPCAEDYLSVVLNQLCVLHEKTPVSDRVTKCCTESLVNRRPCFSALEVDETYVPKEFNAETFTFHADICTLSEKERQIKKQTALVELVKHKPKATKEQLKAVMDDFAAFVEKCCKADDKETCFAEEGKKLVAASQAALGL

SEQ ID NO: 256 - protein, 671 aa, Homo sapiens
MLLQAFLFLLAGFAAKISAMGPYHPSECCFTYTTYKIPRQRIMDYYETNSQCSKPGIVFITKRGHSVCTNPSDKWVQDYIKDMKENDAHKSEVAHRFKDLGEENFKALVLIAFAQYLQQCPFEDHVKLVNEVTEFAKTCVADESAENCDKSLHTLFGDKLCTVATLRETYGEMADCCAKQEPERNECFLQHKDDNPNLPRLVRPEVDVMCTAFHDNEETFLKKYLYEIARRHPYFYAPELLFFAKRYKAAFTECCQAADKAACLLPKLDELRDEGKASSAKQRLKCASLQKFGERAFKAWAVARLSQRFPKAEFAEVSKLVTDLTKVHTECCHGDLLECADDRADLAKYICENQDSISSKLKECCEKPLLEKSHCIAEVENDEMPADLPSLAADFVESKDVCKNYAEAKDVFLGMFLYEYARRHPDYSVVLLLRLAKTYETTLEKCCAAADPHECYAKVFDEFKPLVEEPQNLIKQNCELFEQLGEYKFQNALLVRYTKKVPQVSTPTLVEVSRNLGKVGSKCCKHPEAKRMPCAEDYLSVVLNQLCVLHEKTPVSDRVTKCCTESLVNRRPCFSALEVDETYVPKEFNAETFTFHADICTLSEKERQIKKQTALVELVKHKPKATKEQLKAVMDDFAAFVEKCCKADDKETCFAEEGKKLVAASQAALGL

SEQ ID NO: 257 - protein, 670 aa, Homo sapiens
MLLQAFLFLLAGFAAKISAMPYHPSECCFTYTTYKIPRQRIMDYYETNSQCSKPGIVFITKRGHSVCTNPSDKWVQDYIKDMKENDAHKSEVAHRFKDLGEENFKALVLIAFAQYLQQCPFEDHVKLVNEVTEFAKTCVADESAENCDKSLHTLFGDKLCTVATLRETYGEMADCCAKQEPERNECFLQHKDDNPNLPRLVRPEVDVMCTAFHDNEETFLKKYLYEIARRHPYFYAPELLFFAKRYKAAFTECCQAADKAACLLPKLDELRDEGKASSAKQRLKCASLQKFGERAFKAWAVARLSQRFPKAEFAEVSKLVTDLTKVHTECCHGDLLECADDRADLAKYICENQDSISSKLKECCEKPLLEKSHCIAEVENDEMPADLPSLAADFVESKDVCKNYAEAKDVFLGMFLYEYARRHPDYSVVLLLRLAKTYETTLEKCCAAADPHECYAKVFDEFKPLVEEPQNLIKQNCELFEQLGEYKFQNALLVRYTKKVPQVSTPTLVEVSRNLGKVGSKCCKHPEAKRMPCAEDYLSVVLNQLCVLHEKTPVSDRVTKCCTESLVNRRPCFSALEVDETYVPKEFNAETFTFHADICTLSEKERQIKKQTALVELVKHKPKATKEQLKAVMDDFAAFVEKCCKADDKETCFAEEGKKLVAASQAALGL

SEQ ID NO: 258 - protein, 680 aa, Homo sapiens
MNIFYIFLFLLSFVQGLEHTHRRGSLDKRGPYHPSECCFTYTTYKIPRQRIMDYYETNSQCSKPGIVFITKRGHSVCTNPSDKWVQDYIKDMKENDAHKSEVAHRFKDLGEENFKALVLIAFAQYLQQCPFEDHVKLVNEVTEFAKTCVADESAENCDKSLHTLFGDKLCTVATLRETYGEMADCCAKQEPERNECFLQHKDDNPNLPRLVRPEVDVMCTAFHDNEETFLKKYLYEIARRHPYFYAPELLFFAKRYKAAFTECCQAADKAACLLPKLDELRDEGKASSAKQRLKCASLQKFGERAFKAWAVARLSQRFPKAEFAEVSKLVTDLTKVHTECCHGDLLECADDRADLAKYICENQDSISSKLKECCEKPLLEKSHCIAEVENDEMPADLPSLAADFVESKDVCKNYAEAKDVFLGMFLYEYARRHPDYSVVLLLRLAKTYETTLEKCCAAADPHECYAKVFDEFKPLVEEPQNLIKQNCELFEQLGEYKFQNALLVRYTKKVPQVSTPTLVEVSRNLGKVGSKCCKHPEAKRMPCAEDYLSVVLNQLCVLHEKTPVSDRVTKCCTESLVNRRPCFSALEVDETYVPKEFNAETFTFHADICTLSEKERQIKKQTALVELVKHKPKATKEQLKAVMDDFAAFVEKCCKADDKETCFAEEGKKLVAASQAALGL

SEQ ID NO: 259 - protein, 682 aa, Homo sapiens
MNIFYIFLFLLSFVQGLEHTHRRGSLDKRHAGPYHPSECCFTYTTYKIPRQRIMDYYETNSQCSKPGIVFITKRGHSVCTNPSDKWVQDYIKDMKENDAHKSEVAHRFKDLGEENFKALVLIAFAQYLQQCPFEDHVKLVNEVTEFAKTCVADESAENCDKSLHTLFGDKLCTVATLRETYGEMADCCAKQEPERNECFLQHKDDNPNLPRLVRPEVDVMCTAFHDNEETFLKKYLYEIARRHPYFYAPELLFFAKRYKAAFTECCQAADKAACLLPKLDELRDEGKASSAKQRLKCASLQKFGERAFKAWAVARLSQRFPKAEFAEVSKLVTDLTKVHTECCHGDLLECADDRADLAKYICENQDSISSKLKECCEKPLLEKSHCIAEVENDEMPADLPSLAADFVESKDVCKNYAEAKDVFLGMFLYEYARRHPDYSVVLLLRLAKTYETTLEKCCAAADPHECYAKVFDEFKPLVEEPQNLIKQNCELFEQLGEYKFQNALLVRYTKKVPQVSTPTLVEVSRNLGKVGSKCCKHPEAKRMPCAEDYLSVVLNQLCVLHEKTPVSDRVTKCCTESLVNRRPCFSALEVDETYVPKEFNAETFTFHADICTLSEKERQIKKQTALVELVKHKPKATKEQLKAVMDDFAAFVEKCCKADDKETCFAEEGKKLVAASQAALGL

SEQ ID NO: 260 - protein, 678 aa, Homo sapiens
MKWVSFISLLFLFSSAYSRSLDKRAPIGPYHPSECCFTYTTYKIPRQRIMDYYETNSQCSKPGIVFITKRGHSVCTNPSDKWVQDYIKDMKENDAHKSEVAHRFKDLGEENFKALVLIAFAQYLQQCPFEDHVKLVNEVTEFAKTCVADESAENCDKSLHTLFGDKLCTVATLRETYGEMADCCAKQEPERNECFLQHKDDNPNLPRLVRPEVDVMCTAFHDNEETFLKKYLYEIARRHPYFYAPELLFFAKRYKAAFTECCQAADKAACLLPKLDELRDEGKASSAKQRLKCASLQKFGERAFKAWAVARLSQRFPKAEFAEVSKLVTDLTKVHTECCHGDLLECADDRADLAKYICENQDSISSKLKECCEKPLLEKSHCIAEVENDEMPADLPSLAADFVESKDVCKNYAEAKDVFLGMFLYEYARRHPDYSVVLLLRLAKTYETTLEKCCAAADPHECYAKVFDEFKPLVEEPQNLIKQNCELFEQLGEYKFQNALLVRYTKKVPQVSTPTLVEVSRNLGKVGSKCCKHPEAKRMPCAEDYLSVVLNQLCVLHEKTPVSDRVTKCCTESLVNRRPCFSALEVDETYVPKEFNAETFTFHADICTLSEKERQIKKQTALVELVKHKPKATKEQLKAVMDDFAAFVEKCCKADDKETCFAEEGKKLVAASQAALGL

SEQ ID NO: 261 - protein, 678 aa, Homo sapiens
MKWVSFISLLFLFSSAYSRSLDKRASLGPYHPSECCFTYTTYKIPRQRIMDYYETNSQCSKPGIVFITKRGHSVCTNPSDKWVQDYIKDMKENDAHKSEVAHRFKDLGEENFKALVLIAFAQYLQQCPFEDHVKLVNEVTEFAKTCVADESAENCDKSLHTLFGDKLCTVATLRETYGEMADCCAKQEPERNECFLQHKDDNPNLPRLVRPEVDVMCTAFHDNEETFLKKYLYEIARRHPYFYAPELLFFAKRYKAAFTECCQAADKAACLLPKLDELRDEGKASSAKQRLKCASLQKFGERAFKAWAVARLSQRFPKAEFAEVSKLVTDLTKVHTECCHGDLLECADDRADLAKYICENQDSISSKLKECCEKPLLEKSHCIAEVENDEMPADLPSLAADFVESKDVCKNYAEAKDVFLGMFLYEYARRHPDYSVVLLLRLAKTYETTLEKCCAAADPHECYAKVFDEFKPLVEEPQNLIKQNCELFEQLGEYKFQNALLVRYTKKVPQVSTPTLVEVSRNLGKVGSKCCKHPEAKRMPCAEDYLSVVLNQLCVLHEKTPVSDRVTKCCTESLVNRRPCFSALEVDETYVPKEFNAETFTFHADICTLSEKERQIKKQTALVELVKHKPKATKEQLKAVMDDFAAFVEKCCKADDKETCFAEEGKKLVAASQAALGL

SEQ ID NO: 262 - protein, 678 aa, Homo sapiens
MKWVSFISLLFLFSSAYSRSLDKRSPYGPYHPSECCFTYTTYKIPRQRIMDYYETNSQCSKPGIVFITKRGHSVCTNPSDKWVQDYIKDMKENDAHKSEVAHRFKDLGEENFKALVLIAFAQYLQQCPFEDHVKLVNEVTEFAKTCVADESAENCDKSLHTLFGDKLCTVATLRETYGEMADCCAKQEPERNECFLQHKDDNPNLPRLVRPEVDVMCTAFHDNEETFLKKYLYEIARRHPYFYAPELLFFAKRYKAAFTECCQAADKAACLLPKLDELRDEGKASSAKQRLKCASLQKFGERAFKAWAVARLSQRFPKAEFAEVSKLVTDLTKVHTECCHGDLLECADDRADLAKYICENQDSISSKLKECCEKPLLEKSHCIAEVENDEMPADLPSLAADFVESKDVCKNYAEAKDVFLGMFLYEYARRHPDYSVVLLLRLAKTYETTLEKCCAAADPHECYAKVFDEFKPLVEEPQNLIKQNCELFEQLGEYKFQNALLVRYTKKVPQVSTPTLVEVSRNLGKVGSKCCKHPEAKRMPCAEDYLSVVLNQLCVLHEKTPVSDRVTKCCTESLVNRRPCFSALEVDETYVPKEFNAETFTFHADICTLSEKERQIKKQTALVELVKHKPKATKEQLKAVMDDFAAFVEKCCKADDKETCFAEEGKKLVAASQAALGL

SEQ ID NO: 263 - protein, 679 aa, Homo sapiens
MKWVSFISLLFLFSSAYSRSLDKRMSPYGPYHPSECCFTYTTYKIPRQRIMDYYETNSQCSKPGIVFITKRGHSVCTNPSDKWVQDYIKDMKENDAHKSEVAHRFKDLGEENFKALVLIAFAQYLQQCPFEDHVKLVNEVTEFAKTCVADESAENCDKSLHTLFGDKLCTVATLRETYGEMADCCAKQEPERNECFLQHKDDNPNLPRLVRPEVDVMCTAFHDNEETFLKKYLYEIARRHPYFYAPELLFFAKRYKAAFTECCQAADKAACLLPKLDELRDEGKASSAKQRLKCASLQKFGERAFKAWAVARLSQRFPKAEFAEVSKLVTDLTKVHTECCHGDLLECADDRADLAKYICENQDSISSKLKECCEKPLLEKSHCIAEVENDEMPADLPSLAADFVESKDVCKNYAEAKDVFLGMFLYEYARRHPDYSVVLLLRLAKTYETTLEKCCAAADPHECYAKVFDEFKPLVEEPQNLIKQNCELFEQLGEYKFQNALLVRYTKKVPQVSTPTLVEVSRNLGKVGSKCCKHPEAKRMPCAEDYLSVVLNQLCVLHEKTPVSDRVTKCCTESLVNRRPCFSALEVDETYVPKEFNAETFTFHADICTLSEKERQIKKQTALVELVKHKPKATKEQLKAVMDDFAAFVEKCCKADDKETCFAEEGKKLVAASQAALGL

SEQ ID NO: 264 - protein, 680 aa, Homo sapiens
MKWVSFISLLFLFSSAYSRSLDKRCPYSCGPYHPSECCFTYTTYKIPRQRIMDYYETNSQCSKPGIVFITKRGHSVCTNPSDKWVQDYIKDMKENDAHKSEVAHRFKDLGEENFKALVLIAFAQYLQQCPFEDHVKLVNEVTEFAKTCVADESAENCDKSLHTLFGDKLCTVATLRETYGEMADCCAKQEPERNECFLQHKDDNPNLPRLVRPEVDVMCTAFHDNEETFLKKYLYEIARRHPYFYAPELLFFAKRYKAAFTECCQAADKAACLLPKLDELRDEGKASSAKQRLKCASLQKFGERAFKAWAVARLSQRFPKAEFAEVSKLVTDLTKVHTECCHGDLLECADDRADLAKYICENQDSISSKLKECCEKPLLEKSHCIAEVENDEMPADLPSLAADFVESKDVCKNYAEAKDVFLGMFLYEYARRHPDYSVVLLLRLAKTYETTLEKCCAAADPHECYAKVFDEFKPLVEEPQNLIKQNCELFEQLGEYKFQNALLVRYTKKVPQVSTPTLVEVSRNLGKVGSKCCKHPEAKRMPCAEDYLSVVLNQLCVLHEKTPVSDRVTKCCTESLVNRRPCFSALEVDETYVPKEFNAETFTFHADICTLSEKERQIKKQTALVELVKHKPKATKEQLKAVMDDFAAFVEKCCKADDKETCFAEEGKKLVAASQAALGL

SEQ ID NO: 265 - protein, 678 aa, Homo sapiens
MKWVSFISLLFLFSSAYSRSLDKRGPYGPYHPSECCFTYTTYKIPRQRIMDYYETNSQCSKPGIVFITKRGHSVCTNPSDKWVQDYIKDMKENDAHKSEVAHRFKDLGEENFKALVLIAFAQYLQQCPFEDHVKLVNEVTEFAKTCVADESAENCDKSLHTLFGDKLCTVATLRETYGEMADCCAKQEPERNECFLQHKDDNPNLPRLVRPEVDVMCTAFHDNEETFLKKYLYEIARRHPYFYAPELLFFAKRYKAAFTECCQAADKAACLLPKLDELRDEGKASSAKQRLKCASLQKFGERAFKAWAVARLSQRFPKAEFAEVSKLVTDLTKVHTECCHGDLLECADDRADLAKYICENQDSISSKLKECCEKPLLEKSHCIAEVENDEMPADLPSLAADFVESKDVCKNYAEAKDVFLGMFLYEYARRHPDYSVVLLLRLAKTYETTLEKCCAAADPHECYAKVFDEFKPLVEEPQNLIKQNCELFEQLGEYKFQNALLVRYTKKVPQVSTPTLVEVSRNLGKVGSKCCKHPEAKRMPCAEDYLSVVLNQLCVLHEKTPVSDRVTKCCTESLVNRRPCFSALEVDETYVPKEFNAETFTFHADICTLSEKERQIKKQTALVELVKHKPKATKEQLKAVMDDFAAFVEKCCKADDKETCFAEEGKKLVAASQAALGL

SEQ ID NO: 266 - protein, 736 aa, Homo sapiens [sequence omitted]

SEQ ID NO: 267 - protein, 165 aa, Homo sapiens [sequence omitted]

SEQ ID NO: 268 - protein, 165 aa, Homo sapiens [sequence omitted]

SEQ ID NO: 269 - protein, 165 aa, Homo sapiens [sequence omitted]

SEQ ID NO: 270 - protein, 165 aa, Homo sapiens [sequence omitted]

SEQ ID NO: 271 - protein, 165 aa, Homo sapiens [sequence omitted]

SEQ ID NO: 272 - protein, 165 aa, Homo sapiens [sequence omitted]

SEQ ID NO: 273 - protein, 165 aa, Homo sapiens [sequence omitted]

SEQ ID NO: 274 - protein, 165 aa, Homo sapiens [sequence omitted]

SEQ ID NO: 275 - protein, 165 aa, Homo sapiens [sequence omitted]

SEQ ID NO: 276 - protein, 165 aa, Homo sapiens [sequence omitted]

SEQ ID NO: 277 - protein, 165 aa, Homo sapiens [sequence omitted]

SEQ ID NO: 278 - protein, 32 aa, Homo sapiens
SPKMVQGSGCFGRKMDRISSSSGLGCKVLRRH

SEQ ID NO: 279 - protein, 32 aa, Homo sapiens; identical to SEQ ID NO: 278

SEQ ID NO: 280 - protein, 29 aa, Homo sapiens
SPKMVQGSGCFGRKMDRISSSSGLGCKVL

SEQ ID NO: 281 - protein, 32 aa, Homo sapiens; identical to SEQ ID NO: 278

SEQ ID NO: 282 - protein, 32 aa, Homo sapiens; identical to SEQ ID NO: 278

SEQ ID NO: 283 - protein, 32 aa, Homo sapiens; identical to SEQ ID NO: 278

SEQ ID NO: 284 - protein, 32 aa, Homo sapiens; identical to SEQ ID NO: 278

SEQ ID NO: 285 - protein, 32 aa, Homo sapiens
SPKMVQGSGCFGGKMDRISSSSGLGCKVLRRH

SEQ ID NO: 286 - protein, 29 aa, Homo sapiens
SPKMVQGSGCFGRKMDRISSSSGLGCKVL

SEQ ID NO: 287 - protein, 32 aa, Homo sapiens; identical to SEQ ID NO: 285

SEQ ID NO: 288 - protein, 32 aa, Homo sapiens
SPKMVQGSGCFGRGMDRISSSSGLGCKVLRRH

SEQ ID NO: 289 - protein, 32 aa, Homo sapiens; identical to SEQ ID NO: 278

SEQ ID NO: 290 - protein, 30 aa, Homo sapiens
SPKMVQGSGCFGRKMDRISSSSGLGCKVLR

SEQ ID NO: 291 - protein, 151 aa, Homo sapiens
MSSFSTTTVSFLLLLAFQLLGQTRANPMYNAVSNADLMDFKNLLDHLEEKMPLEDEVVPPQVLSEPNEEAGAALSPLPEVPPWTGEVSPAQRDGGALGRGPWDSSDRSALLKSKLRALLTAPRSLRRSSCFGGRMDRIGAQSGLGCNSFRY

SEQ ID NO: 292 - protein, 151 aa, Homo sapiens; identical to SEQ ID NO: 291

SEQ ID NO: 293 - protein, 151 aa, Homo sapiens; identical to SEQ ID NO: 291

SEQ ID NO: 294 - protein, 151 aa, Homo sapiens; identical to SEQ ID NO: 291

SEQ ID NO: 295 - protein, 151 aa, Homo sapiens; identical to SEQ ID NO: 291

SEQ ID NO: 296 - protein, 151 aa, Homo sapiens; identical to SEQ ID NO: 291

SEQ ID NO: 297 - protein, 126 aa, Homo sapiens
MHLSQLLACALLLTLLSLRPSEAKPGAPPKVPRTPPAEELAEPQAAGGGQKKGDKAPGGGGANLKGDRSRLLRDLRVDTKSRAAWARLLQEHPNARKYKGANKKGLSKGCFGLKLDRIGSMSGLGC

SEQ ID NO: 298 - protein, 126 aa, Homo sapiens; identical to SEQ ID NO: 297

SEQ ID NO: 299 - protein, 38 aa, Dendroaspis angusticeps
EVKYDPCFGHKIDRINHVSNLGCPSLRDPRPNAPSTSA

SEQ ID NO: 300 - protein, 38 aa, Dendroaspis angusticeps; identical to SEQ ID NO: 299

SEQ ID NO: 301 - protein, 32 aa, Homo sapiens; identical to SEQ ID NO: 278

SEQ ID NO: 302 - protein, 28 aa, Homo sapiens
SLRRSSCFGGRMDRIGAQSGLGCNSFRY

SEQ ID NO: 303 - protein, 93 aa, Homo sapiens
MKISVAAIPFFLLITIALGTKTESSSRGPYHPSECCFTYTTYKIPRQRIMDYYETNSQCSKPGIVFITKRGHSVCTNPSDKWVQDYIKDMKEN

SEQ ID NO: 304 - protein, 93 aa, Homo sapiens; identical to SEQ ID NO: 303

SEQ ID NO: 305 - protein, 93 aa, Homo sapiens; identical to SEQ ID NO: 303

SEQ ID NO: 306 - protein, 93 aa, Homo sapiens; identical to SEQ ID NO: 303

SEQ ID NO: 307 - protein, 93 aa, Homo sapiens; identical to SEQ ID NO: 303

SEQ ID NO: 308 - protein, 93 aa, Homo sapiens; identical to SEQ ID NO: 303

SEQ ID NO: 309 - protein, 93 aa, Homo sapiens; identical to SEQ ID NO: 303

SEQ ID NO: 310 - protein, 93 aa, Homo sapiens; identical to SEQ ID NO: 303

SEQ ID NO: 311 - protein, 93 aa, Homo sapiens; identical to SEQ ID NO: 303

SEQ ID NO: 312 - protein, 74 aa, Homo sapiens
TKTESSSRGPYHPSECCFTYTTYKIPRQRIMDYYETNSQCSKPGIVFITKRGHSVCTNPSDKWVQDYIKDMKEN

SEQ ID NO: 313 - protein, 74 aa, Homo sapiens; identical to SEQ ID NO: 312

SEQ ID NO: 314 - protein, 74 aa, Homo sapiens; identical to SEQ ID NO: 312

SEQ ID NO: 315 - protein, 74 aa, Homo sapiens; identical to SEQ ID NO: 312

SEQ ID NO: 316 - protein, 74 aa, Homo sapiens; identical to SEQ ID NO: 312

SEQ ID NO: 317 - protein, 74 aa, Homo sapiens; identical to SEQ ID NO: 312

SEQ ID NO: 318 - protein, 74 aa, Homo sapiens; identical to SEQ ID NO: 312

SEQ ID NO: 319 - protein, 74 aa, Homo sapiens; identical to SEQ ID NO: 312

SEQ ID NO: 320 - protein, 74 aa, Homo sapiens; identical to SEQ ID NO: 312

SEQ ID NO: 321 - protein, 74 aa, Homo sapiens; identical to SEQ ID NO: 312

SEQ ID NO: 322 - protein, 93 aa, Homo sapiens; identical to SEQ ID NO: 303

SEQ ID NO: 323 - protein, 93 aa, Homo sapiens; identical to SEQ ID NO: 303

SEQ ID NO: 324 - protein, 93 aa, Homo sapiens; identical to SEQ ID NO: 303

SEQ ID NO: 325 - protein, 65 aa, Homo sapiens
PYHPSECCFTYTTYKIPRQRIMDYYETNSQCSKPGIVFITKRGHSVCTNPSDKWVQDYIKDMKEN

SEQ ID NO: 326 - protein, 67 aa, Homo sapiens
RGPYHPSECCFTYTTYKIPRQRIMDYYETNSQCSKPGIVFITKRGHSVCTNPSDKWVQDYIKDMKEN

SEQ ID NO: 327 - protein, 66 aa, Homo sapiens
GPYHPSECCFTYTTYKIPRQRIMDYYETNSQCSKPGIVFITKRGHSVCTNPSDKWVQDYIKDMKEN

SEQ ID NO: 328 - protein, 93 aa, Homo sapiens; identical to SEQ ID NO: 303

SEQ ID NO: 329 - protein, 93 aa, Homo sapiens; identical to SEQ ID NO: 303

SEQ ID NO: 330 - protein, 93 aa, Homo sapiens; identical to SEQ ID NO: 303

SEQ ID NO: 331 - protein, 93 aa, Homo sapiens; identical to SEQ ID NO: 303

SEQ ID NO: 332 - protein, 93 aa, Homo sapiens; identical to SEQ ID NO: 303

SEQ ID NO: 333 - protein, 66 aa, Homo sapiens; identical to SEQ ID NO: 327

SEQ ID NO: 334 - protein, 66 aa, Homo sapiens; identical to SEQ ID NO: 327

SEQ ID NO: 335 - protein, 66 aa, Homo sapiens; identical to SEQ ID NO: 327

SEQ ID NO: 336 - protein, 66 aa, Homo sapiens; identical to SEQ ID NO: 327

SEQ ID NO: 337 - protein, 66 aa, Homo sapiens; identical to SEQ ID NO: 327

SEQ ID NO: 338 - protein, 66 aa, Homo sapiens; identical to SEQ ID NO: 327

SEQ ID NO: 339 - protein, 66 aa, Homo sapiens; identical to SEQ ID NO: 327

SEQ ID NO: 340 - protein, 66 aa, Homo sapiens; identical to SEQ ID NO: 327

SEQ ID NO: 341 - protein, 93 aa, Homo sapiens; identical to SEQ ID NO: 303

SEQ ID NO: 342 - DNA, 20 bp, Homo sapiens
catacaaacttaagagtcca

SEQ ID NO: 343 - DNA, 56 bp, Homo sapiens
ctttaaatcgatgagcaacctcactcttgtgtgcatcagcgttagccaaagaagca

SEQ ID NO: 344 - DNA, 20 bp, Homo sapiens
catacaaacttaagagtcca

SEQ ID NO: 345 - DNA, 56 bp, Homo sapiens
ctttaaatcgatgagcaacctcactcttgtgtgcatctgccgatattttggctgca

SEQ ID NO: 346 - DNA, 20 bp, Homo sapiens
catacaaacttaagagtcca

SEQ ID NO: 347 - DNA, 56 bp, Homo sapiens
ctttaaatcgatgagcaacctcactcttgtgtgcatctctcttatccaaagaacct

SEQ ID NO: 348 - DNA, 41 bp, Homo sapiens; identical to SEQ ID NO: 109

SEQ ID NO: 349 - DNA, 59 bp, Homo sapiens; identical to SEQ ID NO: 110

SEQ ID NO: 350 - DNA, 27 bp, Homo sapiens
gttagcagagtagcagggctttcggct

SEQ ID NO: 351 - DNA, 59 bp, Homo sapiens; identical to SEQ ID NO: 110

SEQ ID NO: 352 - DNA, 41 bp, Homo sapiens; identical to SEQ ID NO: 109

SEQ ID NO: 353 - DNA, 59 bp, Homo sapiens; identical to SEQ ID NO: 110

SEQ ID NO: 354 - DNA, 38 bp, Homo sapiens
caagctgccttaggcttatgtgatctgcctcaaaccca

SEQ ID NO: 355 - DNA, 39 bp, Homo sapiens
gaattcggcgcgccttattccttacttcttaaactttct

SEQ ID NO: 356 - DNA, 107 bp, Homo sapiens
gcgcgcggatccgccaccatggccttgacctttgctttactggtggccctcctggtgctcagctgcaagtcaagctgctctgtgggctgtgatctgcctcaaaccca

SEQ ID NO: 357 - DNA, 59 bp, Homo sapiens; identical to SEQ ID NO: 110

SEQ ID NO: 358 - DNA, 25 bp, Homo sapiens
gcatgtgatctgcctcaaacccaca

SEQ ID NO: 359 - DNA, 59 bp, Homo sapiens; identical to SEQ ID NO: 110

SEQ ID NO: 360 - DNA, 20 bp, Homo sapiens
catacaaacttaagagtcca

SEQ ID NO: 361 - DNA, 67 bp, Homo sapiens
ctttaaatcgatgagcaacctcactcttgtgtgcatctctcttatccaaagaaccggaataagccga

SEQ ID NO: 362 - DNA, 103 bp, Homo sapiens
gagcgcaagcttccgccatcatgaaggtctccgtggctgccctctcctgcctcatgcttgttactgcccttggatcccaggccagccccaagatggtgcaagg

SEQ ID NO: 363 - DNA, 57 bp, Homo sapiens
agtcccatcgatgagcaacctcactcttgtgtgcatcatgccgcctcagcactttgc

SEQ ID NO: 364 - DNA, 103 bp, Homo sapiens
gagcgcaagcttccgccatcatgtggtggcgcctgtggtggctgctgctgctgctgctgctgctgtggcccatggtgtgggccagccccaagatggtgcaagg

SEQ ID NO: 365 - DNA, 57 bp, Homo sapiens; identical to SEQ ID NO: 363

SEQ ID NO: 366 - DNA, 38 bp, Homo sapiens
aggagcgtcgacaaaagaagccccaagatggtgcaagg

SEQ ID NO: 367 - DNA, 26 bp, Homo sapiens
ttataagcctaaggcagcttgacttg

SEQ ID NO: 368 - DNA, 115 bp, Homo sapiens
gagcgcggatccaagcttccgccatcatgcgccccacctgggcctggtggctgttcctggtgctgctgctggccctgtgggcccccgcccgcggcagccccaagatggtgcaagg

SEQ ID NO: 369 - DNA, 57 bp, Homo sapiens; identical to SEQ ID NO: 363

SEQ ID NO: 370 - DNA, 29 bp, Homo sapiens
gagcgcggatccaagcttccgccatcatg

SEQ ID NO: 371 - DNA, 26 bp, Homo sapiens
ctttaaatcgatgagcaacctcactc

SEQ ID NO: 372 - DNA, 109 bp, Homo sapiens
gagcgcggatccaagcttccgccatcatgtggtggcgcctgtggtggctgctgctgctgctgctgctgctgtggcccatggtgtgggccagccccaagatggtgcaagg

SEQ ID NO: 373 - DNA, 38 bp, Homo sapiens
gtcgtcggtaccttataagcctaaggcagcttgacttg

SEQ ID NO: 374 - DNA, 80 bp, Homo sapiens
gagcgcggatccaagcttccgccatcatgtggtggcgcctgtggtggctgctgctgctgctgctgctgctgtggcccatg

SEQ ID NO: 375 - DNA, 57 bp, Homo sapiens; identical to SEQ ID NO: 363

SEQ ID NO: 376 - DNA, 80 bp, Homo sapiens; identical to SEQ ID NO: 374

SEQ ID NO: 377 - DNA, 57 bp, Homo sapiens; identical to SEQ ID NO: 363

SEQ ID NO: 378 - DNA, 40 bp, Homo sapiens
aagctgccttaggcttaagccccaagatggtgcaagggtc

SEQ ID NO: 379 - DNA, 40 bp, Homo sapiens
gcaccgggcgcgccttaatgccgcctcagcactttgcagc

SEQ ID NO: 380 - DNA, 37 bp, Homo sapiens
aggagcgtcgacaaaagaagccccaagatggtgcaag

SEQ ID NO: 381 - DNA, 56 bp, Homo sapiens
cgcgcatcgatgagcaacctcactcttgtgtgcatcatgccgcctcagcactttgc

SEQ ID NO: 382 - DNA, 103 bp, Homo sapiens; identical to SEQ ID NO: 364

SEQ ID NO: 383 - DNA, 57 bp, Homo sapiens; identical to SEQ ID NO: 363

SEQ ID NO: 384 - DNA, 38 bp, Homo sapiens
aggagcgtcgacaaaagaagcctgcggagatccagctg

SEQ ID NO: 385 - DNA, 56 bp, Homo sapiens
gctgtaacagcttccggtacgatgcacacaagagtgaggttgctcatcgatgcgcg

SEQ ID NO: 386 - DNA, 40 bp, Homo sapiens
aggagcgtcgacaaaagaaccaagactgaatcctcctcac

SEQ ID NO: 387 - DNA, 59 bp, Homo sapiens
ctttaaatcgatgagcaacctcactcttgtgtgcatcgttctccttcatgtccttgata

SEQ ID NO: 388 - DNA, 56 bp, Homo sapiens
aggagcgtcgacaaaagaaccaagactgaatcctcctcaaggggaccttaccaccc

SEQ ID NO: 389 - DNA, 59 bp, Homo sapiens; identical to SEQ ID NO: 387

SEQ ID NO: 390 - DNA, 40 bp, Homo sapiens
aggagcgtcgacaaaagaggaccttaccacccctcagagt

SEQ ID NO: 391 - DNA, 59 bp, Homo sapiens; identical to SEQ ID NO: 387

SEQ ID NO: 392 - DNA, 99 bp, Homo sapiens
aggagcgtcgacaaaagaggaccttaccacccctcagagtgctgcttcacctacactacctacaagatcccgcgtcagagaattatggattactatgag

SEQ ID NO: 393 - DNA, 59 bp, Homo sapiens; identical to SEQ ID NO: 387

SEQ ID NO: 394 - DNA, 40 bp, Homo sapiens; identical to SEQ ID NO: 390

SEQ ID NO: 395 - DNA, 107 bp, Homo sapiens
ctttaaatcgatgagcaacctcactcttgtgtgcatcggatccgccgccacctgacccacctccgcctgagccaccgccaccagagttctccttcatgtccttgata

SEQ ID NO: 396 - DNA, 47 bp, Homo sapiens
ccgccgctcgaggggtgtgtttcgtcgaggaccttaccacccctcag

SEQ ID NO: 397 - DNA, 53 bp, Homo sapiens
agtcccatcgatgagcaacctcactcttgtgtgcatcgttctccttcatgtcc

SEQ ID NO: 398 - DNA, 40 bp, Homo sapiens; identical to SEQ ID NO: 390

SEQ ID NO: 399 - DNA, 59 bp, Homo sapiens; identical to SEQ ID NO: 387

SEQ ID NO: 400 - DNA, 70 bp, Homo sapiens
gtgggtaagctttatttcccttctttttctctttagctcggcttattccggaccttaccacccctcagag

SEQ ID NO: 401 - DNA, 36 bp, Homo sapiens
taagaattaagcttattataagcctaaggcagcttg

SEQ ID NO: 402 - DNA, 24 bp, Homo sapiens
tacaaacttaagagtccaattagc

SEQ ID NO: 403 - DNA, 22 bp, Homo sapiens
ctttaaatcgatgagcaacctc

SEQ ID NO: 404 - DNA, 39 bp, Homo sapiens
aggagcgtcgacaaaagaaagactgaatcctcctcacgg

SEQ ID NO: 405 - DNA, 59 bp, Homo sapiens; identical to SEQ ID NO: 387

SEQ ID NO: 406 - DNA, 37 bp, Homo sapiens
aggagcgtcgacaaaagaactgaatcctcctcacggg

SEQ ID NO: 407 - DNA, 59 bp, Homo sapiens; identical to SEQ ID NO: 387

SEQ ID NO: 408 - DNA, 37 bp, Homo sapiens
aggagcgtcgacaaaagagaatcctcctcacggggac

SEQ ID NO: 409 - DNA, 59 bp, Homo sapiens; identical to SEQ ID NO: 387

SEQ ID NO: 410 - DNA, 36 bp, Homo sapiens
aggagcgtcgacaaaagatcctcctcacggggacct

SEQ ID NO: 411 - DNA, 59 bp, Homo sapiens; identical to SEQ ID NO: 387

SEQ ID NO: 412 - DNA, 37 bp, Homo sapiens
aggagcgtcgacaaaagatcctcacggggaccttacc

SEQ ID NO: 413 - DNA, 59 bp, Homo sapiens; identical to SEQ ID NO: 387

SEQ ID NO: 414 - DNA, 37 bp, Homo sapiens
aggagcgtcgacaaaagatcacggggaccttaccacc

SEQ ID NO: 415 - DNA, 59 bp, Homo sapiens; identical to SEQ ID NO: 387

SEQ ID NO: 416 - DNA, 35 bp, Homo sapiens
aggagcgtcgacaaaagacggggaccttaccaccc

SEQ ID NO: 417 - DNA, 59 bp, Homo sapiens; identical to SEQ ID NO: 387

SEQ ID NO: 418 - DNA, 38 bp, Homo sapiens
aggagcgtcgacaaaagaccttaccacccctcagagtg

SEQ ID NO: 419 - DNA, 59 bp, Homo sapiens; identical to SEQ ID NO: 387

SEQ ID NO: 420 - DNA, 38 bp, Homo sapiens
aggagcgtcgacaaaagataccacccctcagagtgctg

SEQ ID NO: 421 - DNA, 59 bp, Homo sapiens; identical to SEQ ID NO: 387

SEQ ID NO: 422 - DNA, 33 bp, Homo sapiens
cgggatcccaggccggaccttaccacccctcag

SEQ ID NO: 423 - DNA, 116 bp, Homo sapiens
ccatcgatgagcaacctcactcttgtgtgcatcgttctccttcatgtccttgatatagccatcgatgagcaacctcactcttgtgtgcatcgttctccttcatgtccttgatatag

SEQ ID NO: 424 - DNA, 22 bp, Homo sapiens
gcaggaccttaccacccctcag

SEQ ID NO: 425 - DNA, 72 bp, Homo sapiens
ctttaaatcgatgagcaacctcactcttgtgtgcatcattttctttcatatctttaatgtaatcttgaaccc

SEQ ID NO: 426 - DNA, 22 bp, Homo sapiens
gcaggaccttaccacccctcag

SEQ ID NO: 427 - DNA, 58 bp, Homo sapiens
ctttaaatcgatgagcaacctcactcttgtgtgcatctctacccttaaccaaccaagc

SEQ ID NO: 428 - DNA, 24 bp, Homo sapiens
gcaggaccttaccacccctcagag

SEQ ID NO: 429 - DNA, 56 bp, Homo sapiens
ctttaaatcgatgagcaacctcactcttgtgtgcatcgttctccttcatgtccttg

SEQ ID NO: 430 - DNA, 23 bp, Homo sapiens
gcaaggggaccttaccacccctc

SEQ ID NO: 431 - DNA, 26 bp, Homo sapiens
ctttaaatcgatgagcaacctcactc

SEQ ID NO: 432 - DNA, 46 bp, Homo sapiens
gcaccttaccacccctcagagtggcaccttaccacccctcagagtg

SEQ ID NO: 433 - DNA, 26 bp, Homo sapiens
ctttaaatcgatgagcaacctcactc

SEQ ID NO: 434 - DNA, 20 bp, Homo sapiens
catacaaacttaagagtcca

SEQ ID NO: 435 - DNA, 27 bp, Homo sapiens
ctcccaaatctttaaatcgatgagcaa

SEQ ID NO: 436 - DNA, 27 bp, Homo sapiens
gcaatgcggggaccttaccacccctca

SEQ ID NO: 437 - DNA, 22 bp, Homo sapiens
ccatcgatgagcaacctcactc

SEQ ID NO: 438 - DNA, 25 bp, Homo sapiens
gcaatgtcacggggaccttaccacc

SEQ ID NO: 439 - DNA, 22 bp, Homo sapiens
ccatcgatgagcaacctcactc

SEQ ID NO: 440 - DNA, 27 bp, Homo sapiens
gcaatgtcctcacggggaccttaccac

SEQ ID NO: 441 - DNA, 22 bp, Homo sapiens
ccatcgatgagcaacctcactc

SEQ ID NO: 442 - DNA, 24 bp, Homo sapiens
gcaatgggaccttaccacccctca

SEQ ID NO: 443 - DNA, 22 bp, Homo sapiens
ccatcgatgagcaacctcactc

SEQ ID NO: 444 - DNA, 27 bp, Homo sapiens
gcaatgccttaccacccctcagagtgc

SEQ ID NO: 445 - DNA, 22 bp, Homo sapiens
ccatcgatgagcaacctcactc

SEQ ID NO: 446 - DNA, 46 bp, Homo sapiens
aggagcgtcgacaaaagagctccaattggaccttaccacccctcag

SEQ ID NO: 447 - DNA, 61 bp, Homo sapiens
cgcgcatcgatgagcaacctcactcttgtgtgcatcgttctccttcatgtccttgatatag

SEQ ID NO: 448 - DNA, 46 bp, Homo sapiens
aggagcgtcgacaaaagagcttctttgggaccttaccacccctcag

SEQ ID NO: 449 - DNA, 61 bp, Homo sapiens; identical to SEQ ID NO: 447

SEQ ID NO: 450 - DNA, 46 bp, Homo sapiens
aggagcgtcgacaaaagatccccctacggaccttaccacccctcag

SEQ ID NO: 451 - DNA, 61 bp, Homo sapiens; identical to SEQ ID NO: 447

SEQ ID NO: 452 - DNA, 49 bp, Homo sapiens
aggagcgtcgacaaaagaatgtctccatacggaccttaccacccctcag

SEQ ID NO: 453 - DNA, 61 bp, Homo sapiens; identical to SEQ ID NO: 447

SEQ ID NO: 454 - DNA, 52 bp, Homo sapiens
aggagcgtcgacaaaagatgtccatactcttgtggaccttaccacccctcag

SEQ ID NO: 455 - DNA, 61 bp, Homo sapiens; identical to SEQ ID NO: 447

SEQ ID NO: 456 - DNA, 46 bp, Homo sapiens
aggagcgtcgacaaaagaggtccatacggaccttaccacccctcag

SEQ ID NO: 457 - DNA, 61 bp, Homo sapiens; identical to SEQ ID NO: 447

SEQ ID NO: 458 - DNA, 30 bp, Homo sapiens
tacaaacttaagagtccaattagcttcatc

SEQ ID NO: 459 - DNA, 19 bp, Homo sapiens
cgcgcatcgatgagcaacc

SEQ ID NO: 460 - DNA, 96 bp, Macaca fascicularis
agccccaagatggtacgagggtctggctgctttgggaggaagatggaccggatcagctcctccagcggcctgggctgcaaagtgctgaggcgacat

SEQ ID NO: 461 - DNA, 135 bp, Rattus norvegicus
tctcaagacagcgccttccggatccaggagagacttcgaaattccaagatggcacatagttcaagctgctttgggcagaagatagaccggatcggcgcagtcagtcgcttgggctgtgacgggctgaggttgttt

SEQ ID NO: 462 - DNA, 135 bp, Rattus norvegicus; identical to SEQ ID NO: 461

SEQ ID NO: 463 - DNA, 96 bp, Homo sapiens; identical to SEQ ID NO: 128

SEQ ID NO: 464 - DNA, 96 bp, Homo sapiens; identical to SEQ ID NO: 128

SEQ ID NO: 465 - DNA, 96 bp, Homo sapiens; identical to SEQ ID NO: 128

SEQ ID NO: 466 - DNA, 495 bp, Homo sapiens; identical to SEQ ID NO: 117

SEQ ID NO: 467 - DNA, 183 bp, Homo sapiens
agccccaagatggtgcaagggtctggctgctttgggaggaagatggaccggatcagctcctccagtggcctgggctgcaaagtgctgagccccaagatggtgcaagggtctggctgctttgggaggaagatggaccggatcagctcctccagtggcctgggctgcaaagtgctgaggcggcat

SEQ ID NO: 468 - DNA, 96 bp, Homo sapiens; identical to SEQ ID NO: 128

SEQ ID NO: 469 - DNA, 96 bp, Homo sapiens; identical to SEQ ID NO: 128

SEQ ID NO: 470 - DNA, 96 bp, Homo sapiens; identical to SEQ ID NO: 128

SEQ ID NO: 471 - DNA, 96 bp, Homo sapiens; identical to SEQ ID NO: 128

SEQ ID NO: 472 - DNA, 96 bp, Homo sapiens; identical to SEQ ID NO: 128

SEQ ID NO: 473 - DNA, 222 bp, Homo sapiens
accaagactgaatcctcctcacggggaccttaccacccctcagcttgctgcttcacctacactacctacaagatcccgcgtcagcggattatggattactatgagaccaacagccagtgctccaagcccggaattgtcttcatcaccaaaaggggccattccgtctgtaccaaccccagtgacaagtgggtccaggactatatcaaggacatgaaggagaac

SEQ ID NO: 474 - DNA, 96 bp, Homo sapiens; identical to SEQ ID NO: 128

SEQ ID NO: 475 - DNA, 96 bp, Homo sapiens; identical to SEQ ID NO: 128

SEQ ID NO: 476 - DNA, 96 bp, Homo sapiens; identical to SEQ ID NO: 128

SEQ ID NO: 477 - DNA, 96 bp, Homo sapiens; identical to SEQ ID NO: 128

SEQ ID NO: 478 - DNA, 96 bp, Homo sapiens; identical to SEQ ID NO: 128

SEQ ID NO: 479 - DNA, 96 bp, Homo sapiens
agcgctaagatggtgcaagggtctggctgctttgggaggaagatggaccggatcagctcctccagtggcctgggctgcaaagtgctgaggcggcat

SEQ ID NO: 480 - DNA, 96 bp, Homo sapiens
agcttgaagatggtgcaagggtctggctgctttgggaggaagatggaccggatcagctcctccagtggcctgggctgcaaagtgctgaggcggcat

SEQ ID NO: 481 - DNA, 96 bp, Canis familiaris
tctccaaaaatgatgcataaatctggttgttttggtagaagattggatagaattggttctttgtctggtttgggttgtaatgttttgagaaaatat

SEQ ID NO: 482 - DNA, 96 bp, Canis familiaris; identical to SEQ ID NO: 481

SEQ ID NO: 483 - DNA, 96 bp, Macaca fascicularis; identical to SEQ ID NO: 460

SEQ ID NO: 484 - DNA, 135 bp, Rattus norvegicus; identical to SEQ ID NO: 461

SEQ ID NO: 485 - DNA, 135 bp, Rattus norvegicus; identical to SEQ ID NO: 461

SEQ ID NO: 486 - DNA, 138 bp, Mus musculus
tctcaaggttctactttgagagttcaacaaagaccacaaaactctaaggttactcacatttcttcttgtttcggtcacaagattgatagaattggttctgtttctagattgggttgtaacgctttgaagttgttgtaa

SEQ ID NO: 487 - DNA, 249 bp, Homo sapiens
ggcatcggcgaccccgtgacctgcctgaagtccggcgccatctgccaccccgtgttctgcccccgccgctacaagcagatcggcacctgcggcctgcccggcaccaagtgctgcaagaagcccggaattggcgatccagtgacttgcctgaagtctggcgctatttgccatcccgtgttttgcccacgccgttacaagcaaatcggcacttgcggactgcccggcaccaaatgctgcaagaagccttag

SEQ ID NO: 488 - DNA, 96 bp, Homo sapiens; identical to SEQ ID NO: 128

SEQ ID NO: 489 - DNA, 126 bp, Homo sapiens
ggcatcggcgaccccgtgacctgcctgaagtccggcgccatctgccaccccgtgttctgcccccgccgctacaagcagatcggcacctgcggcctgcccggcaccaagtgctgcaagaagccctag

SEQ ID NO: 490 - DNA, 123 bp, Homo sapiens
ggcatcggcgaccccgtgacctgcctgaagtccggcgccatctgccaccccgtgttctgcccccgccgctacaagcagatcggcacctgcggcctgcccggcaccaagtgctgcaagaagccc

SEQ ID NO: 491 - DNA, 246 bp, Homo sapiens
ggcatcggcgaccccgtgacctgcctgaagtccggcgccatctgccaccccgtgttctgcccccgccgctacaagcagatcggcacctgcggcctgcccggcaccaagtgctgcaagaagcccggaattggcgatccagtgacttgcctgaagtctggcgctatttgccatcccgtgttttgcccacgccgttacaagcaaatcggcacttgcggactgcccggcaccaaatgctgcaagaagcct

SEQ ID NO: 492 - DNA, 249 bp, Homo sapiens
ggtattggtgatccagttacttgtttgaagtctggtgctatttgtcacccagttttctgtccaagaagatacaagcaaattggtacttgtggtttgccaggtactaagtgttgtaagaagccaggtatcggtgacccagttacctgtttgaagtccggtgctatctgtcacccagtcttctgtccaagaagatacaaacaaatcggtacctgtggtttgccaggtactaaatgttgtaagaaaccatag

SEQ ID NO: 493 - DNA, 126 bp, Homo sapiens
ggtattggtgatccagttacttgtttgaagtctggtgctatttgtcacccagttttctgtccaagaagatacaagcaaattggtacttgtggtttgccaggtactaagtgttgtaagaagccatag

SEQ ID NO: 494 - DNA, 126 bp, Homo sapiens; identical to SEQ ID NO: 493

SEQ ID NO: 495 - DNA, 249 bp, Homo sapiens; identical to SEQ ID NO: 492

SEQ ID NO: 496 - protein, 638 aa, Macaca fascicularis
MKVSVAALSCLMLVTALGSQASPKMVRGSGCFGRKMDRISSSSGLGCKVLRRHDTHKSEVAHRFKDLGEEHFKGLVLVAFSQYLQQCPFEEHVKLVNEVTEFAKTCVADESAENCDKSLHTLFGDKLCTVATLRETYGEMADCCAKQEPERNECFLQHKDDNPNLPPLVRPEVDVMCTAFHDNEATFLKKYLYEVARRHPYFYAPELLFFAARYKAAFAECCQAADKAACLLPKLDELRDQGKASSAKQRLKCASLQKFGDRAFKAWAVARLSQKFPKAEFAEVSKLVTDLTKVHTECCHGDLLECADDRADLAKYMCENQDSISSKLKECCDKPLLEKSHCLAEVENDEMPADLPSLAADYVESKDVCKNYAEAKDVFLGMFLYEYARRHPDYSVMLLLRLAKAYEATLEKCCAAADPHECYAKVFDEFQPLVEEPQNLVKQNCELFEQLGEYKFQNALLVRYTKKVPQVSTPTLVEVSRNLGKVGAKCCKLPEAKRMPCAEDYLSVVLNRLCVLHEKTPVSEKVTKCCTESLVNRRPCFSALELDEAYVPKAFNAETFTFHADMCTLSEKEKQVKKQTALVELVKHKPKATKEQLKGVMDNFAAFVEKCCKADDKEACFAEEGPKFVAASQAALGL

SEQ ID NO: 497 - protein, 653 aa, Rattus norvegicus
MKWVTFISLLFLFSSAYSRGVFRRSQDSAFRIQERLRNSKMAHSSSCFGQKIDRIGAVSRLGCDGLRLFEAHKSEIAHRFKDLGEQHFKGLVLIAFSQYLQKCPYEEHIKLVQEVTDFAKTCVADENAENCDKSIHTLFGDKLCAIPKLRDNYGELADCCAKQEPERNECFLQHKDDNPNLPPFQRPEAEAMCTSFQENPTSFLGHYLHEVARRHPYFYAPELLYYAEKYNEVLTQCCTESDKAACLTPKLDAVKEKALVAAVRQRMKCSSMQRFGERAFKAWAVARMSQRFPNAEFAEITKLATDVTKINKECCHGDLLECADDRAELAKYMCENQATISSKLQACCDKPVLQKSQCLAETEHDNIPADLPSIAADFVEDKEVCKNYAEAKDVFLGTFLYEYSRRHPDYSVSLLLRLAKKYEATLEKCCAEGDPPACYGTVLAEFQPLVEEPKNLVKTNCELYEKLGEYGFQNAVLVRYTQKAPQVSTPTLVEAARNLGRVGTKCCTLPEAQRLPCVEDYLSAILNRLCVLHEKTPVSEKVTKCCSGSLVERRPCFSALTVDETYVPKEFKAETFTFHSDICTLPDKEKQIKKQTALAELVKHKPKATEDQLKTVMGDFAQFVDKCCKAADKDNCFATEGPNLVARSKEALA

SEQ ID NO: 498 - protein, 650 aa, Rattus norvegicus
MKVSVAALSCLMLVTALGSQASQDSAFRIQERLRNSKMAHSSSCFGQKIDRIGAVSRLGCDGLRLFEAHKSEIAHRFKDLGEQHFKGLVLIAFSQYLQKCPYEEHIKLVQEVTDFAKTCVADENAENCDKSIHTLFGDKLCAIPKLRDNYGELADCCAKQEPERNECFLQHKDDNPNLPPFQRPEAEAMCTSFQENPTSFLGHYLHEVARRHPYFYAPELLYYAEKYNEVLTQCCTESDKAACLTPKLDAVKEKALVAAVRQRMKCSSMQRFGERAFKAWAVARMSQRFPNAEFAEITKLATDVTKINKECCHGDLLECADDRAELAKYMCENQATISSKLQACCDKPVLQKSQCLAETEHDNIPADLPSIAADFVEDKEVCKNYAEAKDVFLGTFLYEYSRRHPDYSVSLLLRLAKKYEATLEKCCAEGDPPACYGTVLAEFQPLVEEPKNLVKTNCELYEKLGEYGFQNAVLVRYTQKAPQVSTPTLVEAARNLGRVGTKCCTLPEAQRLPCVEDYLSAILNRLCVLHEKTPVSEKVTKCCSGSLVERRPCFSALTVDETYVPKEFKAETFTFHSDICTLPDKEKQIKKQTALAELVKHKPKATEDQLKTVMGDFAQFVDKCCKAADKDNCFATEGPNLVARSKEALA

SEQ ID NO: 499 - protein, 639 aa, Homo sapiens
MKWVSFISLLFLFSSAYSRSLDKRKMVQGSGCFGRKMDRISSSSGLGCKVLRRHDAHKSEVAHRFKDLGEENFKALVLIAFAQYLQQCPFEDHVKLVNEVTEFAKTCVADESAENCDKSLHTLFGDKLCTVATLRETYGEMADCCAKQEPERNECFLQHKDDNPNLPRLVRPEVDVMCTAFHDNEETFLKKYLYEIARRHPYFYAPELLFFAKRYKAAFTECCQAADKAACLLPKLDELRDEGKASSAKQRLKCASLQKFGERAFKAWAVARLSQRFPKAEFAEVSKLVTDLTKVHTECCHGDLLECADDRADLAKYICENQDSISSKLKECCEKPLLEKSHCIAEVENDEMPADLPSLAADFVESKDVCKNYAEAKDVFLGMFLYEYARRHPDYSVVLLLRLAKTYETTLEKCCAAADPHECYAKVFDEFKPLVEEPQNLIKQNCELFEQLGEYKFQNALLVRYTKKVPQVSTPTLVEVSRNLGKVGSKCCKHPEAKRMPCAEDYLSVVLNQLCVLHEKTPVSDRVTKCCTESLVNRRPCFSALEVDETYVPKEFNAETFTFHADICTLSEKERQIKKQTALVELVKHKPKATKEQLKAVMDDFAAFVEKCCKADDKETCFAEEGKKLVAASQAALGL

SEQ ID NO: 500 - protein, 640 aa, Homo sapiens
MKWVSFISLLFLFSSAYSRSLDKRKMVQGSGCFGRKMDRISSSSGLGCKVLRGGGDAHKSEVAHRFKDLGEENFKALVLIAFAQYLQQCPFEDHVKLVNEVTEFAKTCVADESAENCDKSLHTLFGDKLCTVATLRETYGEMADCCAKQEPERNECFLQHKDDNPNLPRLVRPEVDVMCTAFHDNEETFLKKYLYEIARRHPYFYAPELLFFAKRYKAAFTECCQAADKAACLLPKLDELRDEGKASSAKQRLKCASLQKFGERAFKAWAVARLSQRFPKAEFAEVSKLVTDLTKVHTECCHGDLLECADDRADLAKYICENQDSISSKLKECCEKPLLEKSHCIAEVENDEMPADLPSLAADFVESKDVCKNYAEAKDVFLGMFLYEYARRHPDYSVVLLLRLAKTYETTLEKCCAAADPHECYAKVFDEFKPLVEEPQNLIKQNCELFEQLGEYKFQNALLVRYTKKVPQVSTPTLVEVSRNLGKVGSKCCKHPEAKRMPCAEDYLSVVLNQLCVLHEKTPVSDRVTKCCTESLVNRRPCFSALEVDETYVPKEFNAETFTFHADICTLSEKERQIKKQTALVELVKHKPKATKEQLKAVMDDFAAFVEKCCKADDKETCFAEEGKKLVAASQAALGL

SEQ ID NO: 501 - protein, 638 aa, Homo sapiens
MKWVSFISLLFLFSSAYSRSLDKRDAHKSEVAHRFKDLGEENFKALVLIAFAQYLQQCPFEDHVKLVNEVTEFAKTCVADESAENCDKSLHTLFGDKLCTVATLRETYGEMADCCAKQEPERNECFLQHKDDNPNLPRLVRPEVDVMCTAFHDNEETFLKKYLYEIARRHPYFYAPELLFFAKRYKAAFTECCQAADKAACLLPKLDELRDEGKASSAKQRLKCASLQKFGERAFKAWAVARLSQRFPKAEFAEVSKLVTDLTKVHTECCHGDLLECADDRADLAKYICENQDSISSKLKECCEKPLLEKSHCIAEVENDEMPADLPSLAADFVESKDVCKNYAEAKDVFLGMFLYEYARRHPDYSVVLLLRLAKTYETTLEKCCAAADPHECYAKVFDEFKPLVEEPQNLIKQNCELFEQLGEYKFQNALLVRYTKKVPQVSTPTLVEVSRNLGKVGSKCCKHPEAKRMPCAEDYLSVVLNQLCVLHEKTPVSDRVTKCCTESLVNRRPCFSALEVDETYVPKEFNAETFTFHADICTLSEKERQIKKQTALVELVKHKPKATKEQLKAVMDDFAAFVEKCCKADDKETCFAEEGKKLVAASQAALGLSPKMVQGSGCFGRKMDRISSSSGLGCKVL

SEQ ID NO: 502 - protein, 774 aa, Homo sapiens
MKWVSFISLLFLFSSAYSRSLDKRDAHKSEVAHRFKDLGEENFKALVLIAFAQYLQQCPFEDHVKLVNEVTEFAKTCVADESAENCDKSLHTLFGDKLCTVATLRETYGEMADCCAKQEPERNECFLQHKDDNPNLPRLVRPEVDVMCTAFHDNEETFLKKYLYEIARRHPYFYAPELLFFAKRYKAAFTECCQAADKAACLLPKLDELRDEGKASSAKQRLKCASLQKFGERAFKAWAVARLSQRFPKAEFAEVSKLVTDLTKVHTECCHGDLLECADDRADLAKYICENQDSISSKLKECCEKPLLEKSHCIAEVENDEMPADLPSLAADFVESKDVCKNYAEAKDVFLGMFLYEYARRHPDYSVVLLLRLAKTYETTLEKCCAAADPHECYAKVFDEFKPLVEEPQNLIKQNCELFEQLGEYKFQNALLVRYTKKVPQVSTPTLVEVSRNLGKVGSKCCKHPEAKRMPCAEDYLSVVLNQLCVLHEKTPVSDRVTKCCTESLVNRRPCFSALEVDETYVPKEFNAETFTFHADICTLSEKERQIKKQTALVELVKHKPKATKEQLKAVMDDFAAFVEKCCKADDKETCFAEEGKKLVAASQAALGLCDLPQTHSLGSRRTLMLLAQMRKISLFSCLKDRHDFGFPQEEFGNQFQKAETIPVLHEMIQQIFNLFSTKDSSAAWDETLLDKFYTELYQQLNDLEACVIQGVGVTETPLMKEDSILAVRKYFQRITLYLKEKKYSPCAWEVVRAEIMRSFSLSTNLQESLRSKE

SEQ ID NO: 503 - protein, 667 aa, Homo sapiens
MKWVSFISLLFLFSSAYSRSLDKRDAHKSEVAHRFKDLGEENFKALVLIAFAQYLQQCPFEDHVKLVNEVTEFAKTCVADESAENCDKSLHTLFGDKLCTVATLRETYGEMADCCAKQEPERNECFLQHKDDNPNLPRLVRPEVDVMCTAFHDNEETFLKKYLYEIARRHPYFYAPELLFFAKRYKAAFTECCQAADKAACLLPKLDELRDEGKASSAKQRLKCASLQKFGERAFKAWAVARLSQRFPKAEFAEVSKLVTDLTKVHTECCHGDLLECADDRADLAKYICENQDSISSKLKECCEKPLLEKSHCIAEVENDEMPADLPSLAADFVESKDVCKNYAEAKDVFLGMFLYEYARRHPDYSVVLLLRLAKTYETTLEKCCAAADPHECYAKVFDEFKPLVEEPQNLIKQNCELFEQLGEYKFQNALLVRYTKKVPQVSTPTLVEVSRNLGKVGSKCCKHPEAKRMPCAEDYLSVVLNQLCVLHEKTPVSDRVTKCCTESLVNRRPCFSALEVDETYVPKEFNAETFTFHADICTLSEKERQIKKQTALVELVKHKPKATKEQLKAVMDDFAAFVEKCCKADDKETCFAEEGKKLVAASQAALGLSPKMVQGSGCFGRKMDRISSSSGLGCKVLSPKMVQGSGCFGRKMDRISSSSGLGCKVL

SEQ ID NO: 504 - protein, 641 aa, Homo sapiens
MKWVTFISLLFLFSSAYSRGVFRRSPKMVQGSGCFGRKMDRISSSSGLGCKVLRRHDAHKSEVAHRFKDLGEENFKALVLIAFAQYLQQCPFEDHVKLVNEVTEFAKTCVADESAENCDKSLHTLFGDKLCTVATLRETYGEMADCCAKQEPERNECFLQHKDDNPNLPRLVRPEVDVMCTAFHDNEETFLKKYLYEIARRHPYFYAPELLFFAKRYKAAFTECCQAADKAACLLPKLDELRDEGKASSAKQRLKCASLQKFGERAFKAWAVARLSQRFPKAEFAEVSKLVTDLTKVHTECCHGDLLECADDRADLAKYICENQDSISSKLKECCEKPLLEKSHCIAEVENDEMPADLPSLAADFVESKDVCKNYAEAKDVFLGMFLYEYARRHPDYSVVLLLRLAKTYETTLEKCCAAADPHECYAKVFDEFKPLVEEPQNLIKQNCELFEQLGEYKFQNALLVRYTKKVPQVSTPTLVEVSRNLGKVGSKCCKHPEAKRMPCAEDYLSVVLNQLCVLHEKTPVSDRVTKCCTESLVNRRPCFSALEVDETYVPKEFNAETFTFHADICTLSEKERQIKKQTALVELVKHKPKATKEQLKAVMDDFAAFVEKCCKADDKETCFAEEGKKLVAASQAALGL

SEQ ID NO: 505 - protein, 639 aa, Homo sapiens
MKWVSFISLLFLFSSAYSRSLDKRDAHKSEVAHRFKDLGEENFKALVLIAFAQYLQQCPFEDHVKLVNEVTEFAKTCVADESAENCDKSLHTLFGDKLCTVATLRETYGEMADCCAKQEPERNECFLQHKDDNPNLPRLVRPEVDVMCTAFHDNEETFLKKYLYEIARRHPYFYAPELLFFAKRYKAAFTECCQAADKAACLLPKLDELRDEGKASSAKQRLKCASLQKFGERAFKAWAVARLSQRFPKAEFAEVSKLVTDLTKVHTECCHGDLLECADDRADLAKYICENQDSISSKLKECCEKPLLEKSHCIAEVENDEMPADLPSLAADFVESKDVCKNYAEAKDVFLGMFLYEYARRHPDYSVVLLLRLAKTYETTLEKCCAAADPHECYAKVFDEFKPLVEEPQNLIKQNCELFEQLGEYKFQNALLVRYTKKVPQVSTPTLVEVSRNLGKVGSKCCKHPEAKRMPCAEDYLSVVLNQLCVLHEKTPVSDRVTKCCTESLVNRRPCFSALEVDETYVPKEFNAETFTFHADICTLSEKERQIKKQTALVELVKHKPKATKEQLKAVMDDFAAFVEKCCKADDKETCFAEEGKKLVAASQAALGLSPKMVQGSGCFGRKMDRISSSSGLGCKVLR

SEQ ID NO: 506 - protein, 640 aa, Homo sapiens
MKWVSFISLLFLFSSAYSRSLDKRDAHKSEVAHRFKDLGEENFKALVLIAFAQYLQQCPFEDHVKLVNEVTEFAKTCVADESAENCDKSLHTLFGDKLCTVATLRETYGEMADCCAKQEPERNECFLQHKDDNPNLPRLVRPEVDVMCTAFHDNEETFLKKYLYEIARRHPYFYAPELLFFAKRYKAAFTECCQAADKAACLLPKLDELRDEGKASSAKQRLKCASLQKFGERAFKAWAVARLSQRFPKAEFAEVSKLVTDLTKVHTECCHGDLLECADDRADLAKYICENQDSISSKLKECCEKPLLEKSHCIAEVENDEMPADLPSLAADFVESKDVCKNYAEAKDVFLGMFLYEYARRHPDYSVVLLLRLAKTYETTLEKCCAAADPHECYAKVFDEFKPLVEEPQNLIKQNCELFEQLGEYKFQNALLVRYTKKVPQVSTPTLVEVSRNLGKVGSKCCKHPEAKRMPCAEDYLSVVLNQLCVLHEKTPVSDRVTKCCTESLVNRRPCFSALEVDETYVPKEFNAETFTFHADICTLSEKERQIKKQTALVELVKHKPKATKEQLKAVMDDFAAFVEKCCKADDKETCFAEEGKKLVAASQAALGLSPKMVQGSGCFGRKMDRISSSSGLGCKVLRR

SEQ ID NO: 507 - protein, 635 aa, Homo sapiens
MKWVTFISLLFLFSSAYSSPKMVQGSGCFGRKMDRISSSSGLGCKVLRRHDAHKSEVAHRFKDLGEENFKALVLIAFAQYLQQCPFEDHVKLVNEVTEFAKTCVADESAENCDKSLHTLFGDKLCTVATLRETYGEMADCCAKQEPERNECFLQHKDDNPNLPRLVRPEVDVMCTAFHDNEETFLKKYLYEIARRHPYFYAPELLFFAKRYKAAFTECCQAADKAACLLPKLDELRDEGKASSAKQRLKCASLQKFGERAFKAWAVARLSQRFPKAEFAEVSKLVTDLTKVHTECCHGDLLECADDRADLAKYICENQDSISSKLKECCEKPLLEKSHCIAEVENDEMPADLPSLAADFVESKDVCKNYAEAKDVFLGMFLYEYARRHPDYSVVLLLRLAKTYETTLEKCCAAADPHECYAKVFDEFKPLVEEPQNLIKQNCELFEQLGEYKFQNALLVRYTKKVPQVSTPTLVEVSRNLGKVGSKCCKHPEAKRMPCAEDYLSVVLNQLCVLHEKTPVSDRVTKCCTESLVNRRPCFSALEVDETYVPKEFNAETFTFHADICTLSEKERQIKKQTALVELVKHKPKATKEQLKAVMDDFAAFVEKCCKADDKETCFAEEGKKLVAASQAALGL

SEQ ID NO: 508 - protein, 636 aa, Homo sapiens
MLLQAFLFLLAGFAAKISASPKMVQGSGCFGRKMDRISSSSGLGCKVLRRHDAHKSEVAHRFKDLGEENFKALVLIAFAQYLQQCPFEDHVKLVNEVTEFAKTCVADESAENCDKSLHTLFGDKLCTVATLRETYGEMADCCAKQEPERNECFLQHKDDNPNLPRLVRPEVDVMCTAFHDNEETFLKKYLYEIARRHPYFYAPELLFFAKRYKAAFTECCQAADKAACLLPKLDELRDEGKASSAKQRLKCASLQKFGERAFKAWAVARLSQRFPKAEFAEVSKLVTDLTKVHTECCHGDLLECADDRADLAKYICENQDSISSKLKECCEKPLLEKSHCIAEVENDEMPADLPSLAADFVESKDVCKNYAEAKDVFLGMFLYEYARRHPDYSVVLLLRLAKTYETTLEKCCAAADPHECYAKVFDEFKPLVEEPQNLIKQNCELFEQLGEYKFQNALLVRYTKKVPQVSTPTLVEVSRNLGKVGSKCCKHPEAKRMPCAEDYLSVVLNQLCVLHEKTPVSDRVTKCCTESLVNRRPCFSALEVDETYVPKEFNAETFTFHADICTLSEKERQIKKQTALVELVKHKPKATKEQLKAVMDDFAAFVEKCCKADDKETCFAEEGKKLVAASQAALGL

SEQ ID NO: 509 - protein, 678 aa, Homo sapiens
MLLQAFLFLLAGFAAKISATKTESSSRGPYHPSACCFTYTTYKIPRQRIMDYYETNSQCSKPGIVFITKRGHSVCTNPSDKWVQDYIKDMKENDAHKSEVAHRFKDLGEENFKALVLIAFAQYLQQCPFEDHVKLVNEVTEFAKTCVADESAENCDKSLHTLFGDKLCTVATLRETYGEMADCCAKQEPERNECFLQHKDDNPNLPRLVRPEVDVMCTAFHDNEETFLKKYLYEIARRHPYFYAPELLFFAKRYKAAFTECCQAADKAACLLPKLDELRDEGKASSAKQRLKCASLQKFGERAFKAWAVARLSQRFPKAEFAEVSKLVTDLTKVHTECCHGDLLECADDRADLAKYICENQDSISSKLKECCEKPLLEKSHCIAEVENDEMPADLPSLAADFVESKDVCKNYAEAKDVFLGMFLYEYARRHPDYSVVLLLRLAKTYETTLEKCCAAADPHECYAKVFDEFKPLVEEPQNLIKQNCELFEQLGEYKFQNALLVRYTKKVPQVSTPTLVEVSRNLGKVGSKCCKHPEAKRMPCAEDYLSVVLNQLCVLHEKTPVSDRVTKCCTESLVNRRPCFSALEVDETYVPKEFNAETFTFHADICTLSEKERQIKKQTALVELVKHKPKATKEQLKAVMDDFAAFVEKCCKADDKETCFAEEGKKLVAASQAALGL

SEQ ID NO: 510 - protein, 639 aa, Homo sapiens
MKWVSFISLLFLFSSAYSRSLDKRSPKMVQGSGCFGRKMDRISSSSGLGCKVLRDAHKSEVAHRFKDLGEENFKALVLIAFAQYLQQCPFEDHVKLVNEVTEFAKTCVADESAENCDKSLHTLFGDKLCTVATLRETYGEMADCCAKQEPERNECFLQHKDDNPNLPRLVRPEVDVMCTAFHDNEETFLKKYLYEIARRHPYFYAPELLFFAKRYKAAFTECCQAADKAACLLPKLDELRDEGKASSAKQRLKCASLQKFGERAFKAWAVARLSQRFPKAEFAEVSKLVTDLTKVHTECCHGDLLECADDRADLAKYICENQDSISSKLKECCEKPLLEKSHCIAEVENDEMPADLPSLAADFVESKDVCKNYAEAKDVFLGMFLYEYARRHPDYSVVLLLRLAKTYETTLEKCCAAADPHECYAKVFDEFKPLVEEPQNLIKQNCELFEQLGEYKFQNALLVRYTKKVPQVSTPTLVEVSRNLGKVGSKCCKHPEAKRMPCAEDYLSVVLNQLCVLHEKTPVSDRVTKCCTESLVNRRPCFSALEVDETYVPKEFNAETFTFHADICTLSEKERQIKKQTALVELVKHKPKATKEQLKAVMDDFAAFVEKCCKADDKETCFAEEGKKLVAASQAALGL

SEQ ID NO: 511 - protein, 655 aa, Homo sapiens
  SITE (274): Xaa equals any of the naturally occurring L-amino acids
MKWVSFISLLFLFSSAYSRSLDKRSPKMVQGSGCFGRKMDRISSSSGLGCKVLRDAHKSEVAHRFKDLGEDAHKSEVAHRFKDLGEENFKALVLIAFAQYLQQCPFEDHVKLVNEVTEFAKTCVADESAENCDKSLHTLFGDKLCTVATLRETYGEMADCCAKQEPERNECFLQHKDDNPNLPRLVRPEVDVMCTAFHDNEETFLKKYLYEIARRHPYFYAPELLFFAKRYKAAFTECCQAADKAACLLPKLDELRDEGKASSAKQRLKCASLXKFGERAFKAWAVARLSQRFPKAEFAEVSKLVTDLTKVHTECCHGDLLECADDRADLAKYICENQDSISSKLKECCEKPLLEKSHCIAEVENDEMPADLPSLAADFVESKDVCKNYAEAKDVFLGMFLYEYARRHPDYSVVLLLRLAKTYETTLEKCCAAADPHECYAKVFDEFKPLVEEPQNLIKQNCELFEQLGEYKFQNALLVRYTKKVPQVSTPTLVEVSRNLGKVGSKCCKHPEAKRMPCAEDYLSVVLNQLCVLHEKTPVSDRVTKCCTESLVNRRPCFSALEVDETYVPKEFNAETFTFHADICTLSEKERQIKKQTALVELVKHKPKATKEQLKAVMDDFAAFVEKCCKADDKETCFAEEGKKLVAASQAALGL

SEQ ID NO: 512 - protein, 671 aa, Homo sapiens
MKWVSFISLLFLFSSAYSRSLDKRSPKMVQGSGCFGRKMDRISSSSGLGCKVLRDAHKSEVAHRFKDLGEENFKALVLIAFAQYLQDAHKSEVAHRFKDLGEENFKALVLIAFAQYLQQCPFEDHVKLVNEVTEFAKTCVADESAENCDKSLHTLFGDKLCTVATLRETYGEMADCCAKQEPERNECFLQHKDDNPNLPRLVRPEVDVMCTAFHDNEETFLKKYLYEIARRHPYFYAPELLFFAKRYKAAFTECCQAADKAACLLPKLDELRDEGKASSAKQRLKCASLQKFGERAFKAWAVARLSQRFPKAEFAEVSKLVTDLTKVHTECCHGDLLECADDRADLAKYICENQDSISSKLKECCEKPLLEKSHCIAEVENDEMPADLPSLAADFVESKDVCKNYAEAKDVFLGMFLYEYARRHPDYSVVLLLRLAKTYETTLEKCCAAADPHECYAKVFDEFKPLVEEPQNLIKQNCELFEQLGEYKFQNALLVRYTKKVPQVSTPTLVEVSRNLGKVGSKCCKHPEAKRMPCAEDYLSVVLNQLCVLHEKTPVSDRVTKCCTESLVNRRPCFSALEVDETYVPKEFNAETFTFHADICTLSEKERQIKKQTALVELVKHKPKATKEQLKAVMDDFAAFVEKCCKADDKETCFAEEGKKLVAASQAALGL

SEQ ID NO: 513 - protein, 638 aa, Homo sapiens
MKVSVAALSCLMLVTALGSQADAHKSEVAHRFKDLGEENFKALVLIAFAQYLQQCPFEDHVKLVNEVTEFAKTCVADESAENCDKSLHTLFGDKLCTVATLRETYGEMADCCAKQEPERNECFLQHKDDNPNLPRLVRPEVDVMCTAFHDNEETFLKKYLYEIARRHPYFYAPELLFFAKRYKAAFTECCQAADKAACLLPKLDELRDEGKASSAKQRLKCASLQKFGERAFKAWAVARLSQRFPKAEFAEVSKLVTDLTKVHTECCHGDLLECADDRADLAKYICENQDSISSKLKECCEKPLLEKSHCIAEVENDEMPADLPSLAADFVESKDVCKNYAEAKDVFLGMFLYEYARRHPDYSVVLLLRLAKTYETTLEKCCAAADPHECYAKVFDEFKPLVEEPQNLIKQNCELFEQLGEYKFQNALLVRYTKKVPQVSTPTLVEVSRNLGKVGSKCCKHPEAKRMPCAEDYLSVVLNQLCVLHEKTPVSDRVTKCCTESLVNRRPCFSALEVDETYVPKEFNAETFTFHADICTLSEKERQIKKQTALVELVKHKPKATKEQLKAVMDDFAAFVEKCCKADDKETCFAEEGKKLVAASQAALGLSPKMVQGSGCFGRKMDRISSSSGLGCKVLRRH

SEQ ID NO: 514 - protein, 638 aa, Homo sapiens
MKWVSFISLLFLFSSAYSRSLDKRDAHKSEVAHRFKDLGEENFKALVLIAFAQYLQQSPFEDHVKLVNEVTEFAKTCVADESAENCDKSLHTLFGDKLCTVATLRETYGEMADCCAKQEPERNECFLQHKDDNPNLPRLVRPEVDVMCTAFHDNEETFLKKYLYEIARRHPYFYAPELLFFAKRYKAAFTECCQAADKAACLLPKLDELRDEGKASSAKQRLKCASLQKFGERAFKAWAVARLSQRFPKAEFAEVSKLVTDLTKVHTECCHGDLLECADDRADLAKYICENQDSISSKLKECCEKPLLEKSHCIAEVENDEMPADLPSLAADFVESKDVCKNYAEAKDVFLGMFLYEYARRHPDYSVVLLLRLAKTYETTLEKCCAAADPHECYAKVFDEFKPLVEEPQNLIKQNCELFEQLGEYKFQNALLVRYTKKVPQVSTPTLVEVSRNLGKVGSKCCKHPEAKRMPCAEDYLSVVLNQLCVLHEKTPVSDRVTKCCTESLVNRRPCFSALEVDETYVPKEFNAETFTFHADICTLSEKERQIKKQTALVELVKHKPKATKEQLKAVMDDFAAFVEKCCKADDKETCFAEEGKKLVAASQAALGLSPKMVQGSGCFGRKMDRISSSSGLGCKVL

SEQ ID NO: 515 - protein, 639 aa, Homo sapiens
MKWVSFISLLFLFSSAYSGSLDKRSAKMVQGSGCFGRKMDRISSSSGLGCKVLRDAHKSEVAHRFKDLGEENFKALVLIAFAQYLQQCPFEDHVKLVNEVTEFAKTCVADESAENCDKSLHTLFGDKLCTVATLRETYGEMADCCAKQEPERNECFLQHKDDNPNLPRLVRPEVDVMCTAFHDNEETFLKKYLYEIARRHPYFYAPELLFFAKRYKAAFTECCQAADKAACLLPKLDELRDEGKASSAKQRLKCASLQKFGERAFKAWAVARLSQRFPKAEFAEVSKLVTDLTKVHTECCHGDLLECADDRADLAKYICENQDSISSKLKECCEKPLLEKSHCIAEVENDEMPADLPSLAADFVESKDVCKNYAEAKDVFLGMFLYEYARRHPDYSVVLLLRLAKTYETTLEKCCAAADPHECYAKVFDEFKPLVEEPQNLIKQNCELFEQLGEYKFQNALLVRYTKKVPQVSTPTLVEVSRNLGKVGSKCCKHPEAKRMPCAEDYLSVVLNQLCVLHEKTPVSDRVTKCCTESLVNRRPCFSALEVDETYVPKEFNAETFTFHADICTLSEKERQIKKQTALVELVKHKPKATKEQLKAVMDDFAAFVEKCCKADDKETCFAEEGKKLVAASQAALGL

SEQ ID NO: 516 - protein, 639 aa, Homo sapiens
MKWVSFISLLFLFSSAYSGSLDKRSLKMVQGSGCFGRKMDRISSSSGLGCKVLRDAHKSEVAHRFKDLGEENFKALVLIAFAQYLQQCPFEDHVKLVNEVTEFAKTCVADESAENCDKSLHTLFGDKLCTVATLRETYGEMADCCAKQEPERNECFLQHKDDNPNLPRLVRPEVDVMCTAFHDNEETFLKKYLYEIARRHPYFYAPELLFFAKRYKAAFTECCQAADKAACLLPKLDELRDEGKASSAKQRLKCASLQKFGERAFKAWAVARLSQRFPKAEFAEVSKLVTDLTKVHTECCHGDLLECADDRADLAKYICENQDSISSKLKECCEKPLLEKSHCIAEVENDEMPADLPSLAADFVESKDVCKNYAEAKDVFLGMFLYEYARRHPDYSVVLLLRLAKTYETTLEKCCAAADPHECYAKVFDEFKPLVEEPQNLIKQNCELFEQLGEYKFQNALLVRYTKKVPQVSTPTLVEVSRNLGKVGSKCCKHPEAKRMPCAEDYLSVVLNQLCVLHEKTPVSDRVTKCCTESLVNRRPCFSALEVDETYVPKEFNAETFTFHADICTLSEKERQIKKQTALVELVKHKPKATKEQLKAVMDDFAAFVEKCCKADDKETCFAEEGKKLVAASQAALGL

SEQ ID NO: 517 - protein, 640 aa, Canis familiaris
MKWVSFISLLFLFSSAYSGSLDKREAYKSEIAHRYNDLGEEHFRGLVLVAFSQYLQQCPFEDHVKLAKEVTEFAKACAAEESGANCDKSLHTLFGDKLCTVASLRDKYGDMADCCEKQEPDRNECFLAHKDDNPGFPPLVAPEPDALCAAFQDNEQLFLGKYLYEIARRHPYFYAPELLYYAQQYKGVFAECCQAADKAACLGPKIEALREKVLLSSAKERFKCASLQKFGDRAFKAWSVARLSQRFPKADFAEISKVVTDLTKVHKECCHGDLLECADDRADLAKYMCENQDSISTKLKECCDKPVLEKSQCLAEVERDELPGDLPSLAADFVEDKEVCKNYQEAKDVFLGTFLYEYARRHPEYSVSLLLRLAKEYEATLEKCCATDDPPTCYAKVLDEFKPLVDEPQNLVKTNCELFEKLGEYGFQNALLVRYTKKAPQVSTPTLVEVSRKLGKVGTKCCKKPESERMSCAEDFLSVVLNRLCVLHEKTPVSERVTKCCSESLVNRRPCFSGLEVDETYVPKEFNAETFTFHADLCTLPEAEKQVKKQTALVELLKHKPKATDEQLKTVMGDFGAFVEKCCAAENKEGCFSEEGPKLVAAAQAALVSPKMMHKSGCFGRRLDRIGSLSGLGCNVLRKY

SEQ ID NO: 518 - protein, 637 aa, Canis familiaris
MKWVSFISLLFLFSSAYSGSLDKREAYKSEIAHRYNDLGEEHFRGLVLVAFSQYLQQCPFEDHVKLAKEVTEFAKACAAEESGANCDKSLHTLFGDKLCTVASLRDKYGDMADCCEKQEPDRNECFLAHKDDNPGFPPLVAPEPDALCAAFQDNEQLFLGKYLYEIARRHPYFYAPELLYYAQQYKGVFAECCQAADKAACLGPKIEALREKVLLSSAKERFKCASLQKFGDRAFKAWSVARLSQRFPKADFAEISKVVTDLTKVHKECCHGDLLECADDRADLAKYMCENQDSISTKLKECCDKPVLEKSQCLAEVERDELPGDLPSLAADFVEDKEVCKNYQEAKDVFLGTFLYEYARRHPEYSVSLLLRLAKEYEATLEKCCATDDPPTCYAKVLDEFKPLVDEPQNLVKTNCELFEKLGEYGFQNALLVRYTKKAPQVSTPTLVEVSRKLGKVGTKCCKKPESERMSCAEDFLSVVLNRLCVLHEKTPVSERVTKCCSESLVNRRPCFSGLEVDETYVPKEFNAETFTFHADLCTLPEAEKQVKKQTALVELLKHKPKATDEQLKTVMGDFGAFVEKCCAAENKEGCFSEEGPKLVAAAQAALVSPKMMHKSGCFGRRLDRIGSLSGLGCNVL

SEQ ID NO: 519 - protein, 642 aa, Macaca fascicularis
MNIFYIFLFLLSFVQGLEHTHRRGSLDKRDTHKSEVAHRFKDLGEEHFKGLVLVAFSQYLQQCPFEEHVKLVNEVTEFAKTCVADESAENCDKSLHTLFGDKLCTVATLRETYGEMADCCAKQEPERNECFLQHKDDNPNLPPLVRPEVDVMCTAFHDNEATFLKKYLYEVARRHPYFYAPELLFFAARYKAAFAECCQAADKAACLLPKLDELRDQGKASSAKQRLKCASLQKFGDRAFKAWAVARLSQKFPKAEFAEVSKLVTDLTKVHTECCHGDLLECADDRADLAKYMCENQDSISSKLKECCDKPLLEKSHCLAEVENDEMPADLPSLAADYVESKDVCKNYAEAKDVFLGMFLYEYARRHPDYSVMLLLRLAKAYEATLEKCCAAADPHECYAKVFDEFQPLVEEPQNLVKQNCELFEQLGEYKFQNALLVRYTKKVPQVSTPTLVEVSRNLGKVGAKCCKLPEAKRMPCAEDYLSVVLNRLCVLHEKTPVSEKVTKCCTESLVNRRPCFSALELDEAYVPKAFNAETFTFHADMCTLSEKEKQVKKQTALVELVKHKPKATKEQLKGVMDNFAAFVEKCCKADDKEACFAEEGPKFVAASQAALASPKMVRGSGCFGRKMDRISSSSGLGCKVL

SEQ ID NO: 520 - protein, 658 aa, Rattus norvegicus
  SITE (551): Xaa equals any of the naturally occurring L-amino acids
MNIFYIFLFLLSFVQGLEHTHRRGSLDKREAHKSEIAHRFKDLGEQHFKGLVLIAFSQYLQKCPYEEHIKLVQEVTDFAKTCVADENAENCDKSIHTLFGDKLCAIPKLRDNYGELADCCAKQEPERNECFLQHKDDNPNLPPFQRPEAEAMCTSFQENPTSFLGHYLHEVARRHPYFYAPELLYYAEKYNEVLTQCCTESDKAACLTPKLDAVKEKALVAAVRQRMKCSSMQRFGERAFKAWAVARMSQRFPNAEFAEITKLATDVTKINKECCHGDLLECADDRAELAKYMCENQATISSKLQACCDKPVLQKSQCLAETEHDNIPADLPSIAADFVEDKEVCKNYAEAKDVFLGTFLYEYSRRHPDYSVSLLLRLAKKYEATLEKCCAEGDPPACYGTVLAEFQPLVEEPKNLVKTNCELYEKLGEYGFQNAVLVRYTQKAPQVSTPTLVEAARNLGRVGTKCCTLPEAQRLPCVEDYLSAILNRLCVLHEKTPVSEKVTKCCSGSLVERRPCFSALTVDETYVPKEFKAETFTFHSDICTLPDKEKXIKKQTALAELVKHKPKATEDQLKTVMGDFAQFVDKCCKAADKDNCFATEGPNLVARSKEALASQDSAFRIQERLRNSKMAHSSSCFGQKIDRIGAVSRLGCDGLRLF

SEQ ID NO: 521 - protein, 642 aa, Rattus norvegicus
MNIFYIFLFLLSFVQGLEHTHRRGSLDKREAHKSEIAHRFKDLGEQHFKGLVLIAFSQYLQKCPYEEHIKLVQEVTDFAKTCVADENAENCDKSIHTLFGDKLCAIPKLRDNYGELADCCAKQEPERNECFLQHKDDNPNLPPFQRPEAEAMCTSFQENPTSFLGHYLHEVARRHPYFYAPELLYYAEKYNEVLTQCCTESDKAACLTPKLDAVKEKALVAAVRQRMKCSSMQRFGERAFKAWAVARMSQRFPNAEFAEITKLATDVTKINKECCHGDLLECADDRAELAKYMCENQATISSKLQACCDKPVLQKSQCLAETEHDNIPADLPSIAADFVEDKEVCKNYAEAKDVFLGTFLYEYSRRHPDYSVSLLLRLAKKYEATLEKCCAEGDPPACYGTVLAEFQPLVEEPKNLVKTNCELYEKLGEYGFQNAVLVRYTQKAPQVSTPTLVEAARNLGRVGTKCCTLPEAQRLPCVEDYLSAILNRLCVLHEKTPVSEKVTKCCSGSLVERRPCFSALTVDETYVPKEFKAETFTFHSDICTLPDKEKQIKKQTALAELVKHKPKATEDQLKTVMGDFAQFVDKCCKAADKDNCFATEGPNLVARSKEALANSKMAHSSSCFGQKIDRIGAVSRLGCDGL

SEQ ID NO: 522 - protein, 648 aa, Mus musculus
MLLQAFLFLLAGFAAKISAEAHKSEIAHRYNDLGEQHFKGLVLIAFSQYLQKCSYDEHAKLVQEVTDFAKTCVADESAANCDKSLHTLFGDKLCAIPNLRENYGELADCCTKQEPERNECFLQHKDDNPSLPPFERPEAEAMCTSFKENPTTFMGHYLHEVARRHPYFYAPELLYYAEQYNEILTQCCAEADKESCLTPKLDGVKEKALVSSVRQRMKCSSMQKFGERAFKAWAVARLSQTFPNADFAEITKLATDLTKVNKECCHGDLLECADDRAELAKYMCENQATISSKLQTCCDKPLLKKAHCLSEVEHDTMPADLPAIAADFVEDQEVCKNYAEAKDVFLGTFLYEYSRRHPDYSVSLLLRLAKKYEATLEKCCAEANPPACYGTVLAEFQPLVEEPKNLVKTNCDLYEKLGEYGFQNAILVRYTQKAPQVSTPTLVEAARNLGRVGTKCCTLPEDQRLPCVEDYLSAILNRVCLLHEKTPVSEHVTKCCSGSLVERRPCFSALTVDETYVPKEFKAETFTFHSDICTLPEKEKQIKKQTALAELVKHKPKATAEQLKTVMDDFAQFLDTCCKAADKDTCFSTEGPNLVTRCKDALASQGSTLRVQQRPQNSKVTHISSCFGHKIDRIGSVSRLGCNALKLL

SEQ ID NO: 523 - protein, 691 aa, Homo sapiens
MKWVTFISLLFLFSSAYSRGVFRRDAHKSEVAHRFKDLGEENFKALVLIAFAQYLQQCPFEDHVKLVNEVTEFAKTCVADESAENCDKSLHTLFGDKLCTVATLRETYGEMADCCAKQEPERNECFLQHKDDNPNLPRLVRPEVDVMCTAFHDNEETFLKKYLYEIARRHPYFYAPELLFFAKRYKAAFTECCQAADKAACLLPKLDELRDEGKASSAKQRLKCASLQKFGERAFKAWAVARLSQRFPKAEFAEVSKLVTDLTKVHTECCHGDLLECADDRADLAKYICENQDSISSKLKECCEKPLLEKSHCIAEVENDEMPADLPSLAADFVESKDVCKNYAEAKDVFLGMFLYEYARRHPDYSVVLLLRLAKTYETTLEKCCAAADPHECYAKVFDEFKPLVEEPQNLIKQNCELFEQLGEYKFQNALLVRYTKKVPQVSTPTLVEVSRNLGKVGSKCCKHPEAKRMPCAEDYLSVVLNQLCVLHEKTPVSDRVTKCCTESLVNRRPCFSALEVDETYVPKEFNAETFTFHADICTLSEKERQIKKQTALVELVKHKPKATKEQLKAVMDDFAAFVEKCCKADDKETCFAEEGKKLVAASQAALGLGIGDPVTCLKSGAICHPVFCPRRYKQIGTCGLPGTKCCKKPGIGDPVTCLKSGAICHPVFCPRRYKQIGTCGLPGTKCCKKP

SEQ ID NO: 524 - protein, 666 aa, Homo sapiens
MKWVSFISLLFLFSSAYSRSLDKRSLRRSSCFGGRMDRIGAQSGLGCNSFRYDAHKSEVAHRFKDLGEENFKALVLIAFAQYLQQCPFEDHVKLVNEVTEFAKTCVADESAENCDKSLHTLFGDKLCTVATLRETYGEMADCCAKQEPERNECFLQHKDDNPNLPRLVRPEVDVMCTAFHDNEETFLKKYLYEIARRHPYFYAPELLFFAKRYKAAFTECCQAADKAACLLPKLDELRDEGKASSAKQRLKCASLQKFGERAFKAWAVARLSQRFPKAEFAEVSKLVTDLTKVHTECCHGDLLECADDRADLAKYICENQDSISSKLKECCEKPLLEKSHCIAEVENDEMPADLPSLAADFVESKDVCKNYAEAKDVFLGMFLYEYARRHPDYSVVLLLRLAKTYETTLEKCCAAADPHECYAKVFDEFKPLVEEPQNLIKQNCELFEQLGEYKFQNALLVRYTKKVPQVSTPTLVEVSRNLGKVGSKCCKHPEAKRMPCAEDYLSVVLNQLCVLHEKTPVSDRVTKCCTESLVNRRPCFSALEVDETYVPKEFNAETFTFHADICTLSEKERQIKKQTALVELVKHKPKATKEQLKAVMDDFAAFVEKCCKADDKETCFAEEGKKLVAASQAALGLSPKMVQGSGCFGRKMDRISSSSGLGCKVL

SEQ ID NO: 525 - protein, 650 aa, Homo sapiens
MKWVTFISLLFLFSSAYSRGVFRRDAHKSEVAHRFKDLGEENFKALVLIAFAQYLQQCPFEDHVKLVNEVTEFAKTCVADESAENCDKSLHTLFGDKLCTVATLRETYGEMADCCAKQEPERNECFLQHKDDNPNLPRLVRPEVDVMCTAFHDNEETFLKKYLYEIARRHPYFYAPELLFFAKRYKAAFTECCQAADKAACLLPKLDELRDEGKASSAKQRLKCASLQKFGERAFKAWAVARLSQRFPKAEFAEVSKLVTDLTKVHTECCHGDLLECADDRADLAKYICENQDSISSKLKECCEKPLLEKSHCIAEVENDEMPADLPSLAADFVESKDVCKNYAEAKDVFLGMFLYEYARRHPDYSVVLLLRLAKTYETTLEKCCAAADPHECYAKVFDEFKPLVEEPQNLIKQNCELFEQLGEYKFQNALLVRYTKKVPQVSTPTLVEVSRNLGKVGSKCCKHPEAKRMPCAEDYLSVVLNQLCVLHEKTPVSDRVTKCCTESLVNRRPCFSALEVDETYVPKEFNAETFTFHADICTLSEKERQIKKQTALVELVKHKPKATKEQLKAVMDDFAAFVEKCCKADDKETCFAEEGKKLVAASQAALGLGIGDPVTCLKSGAICHPVFCPRRYKQIGTCGLPGTKCCKKP

SEQ ID NO: 526 - protein, 648 aa, Homo sapiens
MKWVTFISLLFLFSSAYSRGVFRRGIGDPVTCLKSGAICHPVFCPRRYKQIGTCGLPGTKCCKKPDAHKSEVAHRFKDLGEENFKALVLIAFAQYLQQCPFEDHVKLVNEVTEFAKTCVADESAENCDKSLHTLFGDKLCTVATLRETYGEMADCCAKQEPERNECFLQHKDDNPNLPRLVRPEVDVMCTAFHDNEETFLKKYLYEIARRHPYFYAPELLFFAKRYKAAFTECCQAADKAACLLPKLDELRDEGKASSAKQRLKCASLQKFGERAFKAWAVARLSQRFPKAEFAEVSKLVTDLTKVHTECCHGDLLECADDRADLAKYICENQDSISSKLKECCEKPLLEKSHCIAEVENDEMPADLPSLAADFVESKDVCKNYAEAKDVFLGMFLYEYARRHPDYSVVLLLRLAKTYETTLEKCCAAADPHECYAKVFDEFKPLVEEPQNLIKQNCELFEQLGEYKFQNALLVRYTKKVPQVSTPTLVEVSRNLGKVGSKCCKHPEAKRMPCAEDYLSVVLNQLCVLHEKTPVSDRVTKCCTESLVNRRPCFSALEVDETYVPKEFNAETFTFHADICTLSEKERQIKKQTALVELVKHKPKATKEQLKAVMDDFAAFVEKCCKADDKETCFAEEGKKLVAASQAAL

SEQ ID NO: 527 - protein, 689 aa, Homo sapiens
MKWVTFISLLFLFSSAYSRGVFRRGIGDPVTCLKSGAICHPVFCPRRYKQIGTCGLPGTKCCKKPGIGDPVTCLKSGAICHPVFCPRRYKQIGTCGLPGTKCCKKPDAHKSEVAHRFKDLGEENFKALVLIAFAQYLQQCPFEDHVKLVNEVTEFAKTCVADESAENCDKSLHTLFGDKLCTVATLRETYGEMADCCAKQEPERNECFLQHKDDNPNLPRLVRPEVDVMCTAFHDNEETFLKKYLYEIARRHPYFYAPELLFFAKRYKAAFTECCQAADKAACLLPKLDELRDEGKASSAKQRLKCASLQKFGERAFKAWAVARLSQRFPKAEFAEVSKLVTDLTKVHTECCHGDLLECADDRADLAKYICENQDSISSKLKECCEKPLLEKSHCIAEVENDEMPADLPSLAADFVESKDVCKNYAEAKDVFLGMFLYEYARRHPDYSVVLLLRLAKTYETTLEKCCAAADPHECYAKVFDEFKPLVEEPQNLIKQNCELFEQLGEYKFQNALLVRYTKKVPQVSTPTLVEVSRNLGKVGSKCCKHPEAKRMPCAEDYLSVVLNQLCVLHEKTPVSDRVTKCCTESLVNRRPCFSALEVDETYVPKEFNAETFTFHADICTLSEKERQIKKQTALVELVKHKPKATKEQLKAVMDDFAAFVEKCCKADDKETCFAEEGKKLVAASQAAL

SEQ ID NO: 528 - protein, 691 aa, Homo sapiens
MKWVSFISLLFLFSSAYSRSLDKRGIGDPVTCLKSGAICHPVFCPRRYKQIGTCGLPGTKCCKKPGIGDPVTCLKSGAICHPVFCPRRYKQIGTCGLPGTKCCKKPDAHKSEVAHRFKDLGEENFKALVLIAFAQYLQQCPFEDHVKLVNEVTEFAKTCVADESAENCDKSLHTLFGDKLCTVATLRETYGEMADCCAKQEPERNECFLQHKDDNPNLPRLVRPEVDVMCTAFHDNEETFLKKYLYEIARRHPYFYAPELLFFAKRYKAAFTECCQAADKAACLLPKLDELRDEGKASSAKQRLKCASLQKFGERAFKAWAVARLSQRFPKAEFAEVSKLVTDLTKVHTECCHGDLLECADDRADLAKYICENQDSISSKLKECCEKPLLEKSHCIAEVENDEMPADLPSLAADFVESKDVCKNYAEAKDVFLGMFLYEYARRHPDYSVVLLLRLAKTYETTLEKCCAAADPHECYAKVFDEFKPLVEEPQNLIKQNCELFEQLGEYKFQNALLVRYTKKVPQVSTPTLVEVSRNLGKVGSKCCKHPEAKRMPCAEDYLSVVLNQLCVLHEKTPVSDRVTKCCTESLVNRRPCFSALEVDETYVPKEFNAETFTFHADICTLSEKERQIKKQTALVELVKHKPKATKEQLKAVMDDFAAFVEKCCKADDKETCFAEEGKKLVAASQAALGL

SEQ ID NO: 529 - protein, 650 aa, Homo sapiens
MKWVSFISLLFLFSSAYSRSLDKRGIGDPVTCLKSGAICHPVFCPRRYKQIGTCGLPGTKCCKKPDAHKSEVAHRFKDLGEENFKALVLIAFAQYLQQCPFEDHVKLVNEVTEFAKTCVADESAENCDKSLHTLFGDKLCTVATLRETYGEMADCCAKQEPERNECFLQHKDDNPNLPRLVRPEVDVMCTAFHDNEETFLKKYLYEIARRHPYFYAPELLFFAKRYKAAFTECCQAADKAACLLPKLDELRDEGKASSAKQRLKCASLQKFGERAFKAWAVARLSQRFPKAEFAEVSKLVTDLTKVHTECCHGDLLECADDRADLAKYICENQDSISSKLKECCEKPLLEKSHCIAEVENDEMPADLPSLAADFVESKDVCKNYAEAKDVFLGMFLYEYARRHPDYSVVLLLRLAKTYETTLEKCCAAADPHECYAKVFDEFKPLVEEPQNLIKQNCELFEQLGEYKFQNALLVRYTKKVPQVSTPTLVEVSRNLGKVGSKCCKHPEAKRMPCAEDYLSVVLNQLCVLHEKTPVSDRVTKCCTESLVNRRPCFSALEVDETYVPKEFNAETFTFHADICTLSEKERQIKKQTALVELVKHKPKATKEQLKAVMDDFAAFVEKCCKADDKETCFAEEGKKLVAASQAALGL

SEQ ID NO: 530 - protein, 650 aa, Homo sapiens
MKWVSFISLLFLFSSAYSRSLDKRDAHKSEVAHRFKDLGEENFKALVLIAFAQYLQQCPFEDHVKLVNEVTEFAKTCVADESAENCDKSLHTLFGDKLCTVATLRETYGEMADCCAKQEPERNECFLQHKDDNPNLPRLVRPEVDVMCTAFHDNEETFLKKYLYEIARRHPYFYAPELLFFAKRYKAAFTECCQAADKAACLLPKLDELRDEGKASSAKQRLKCASLQKFGERAFKAWAVARLSQRFPKAEFAEVSKLVTDLTKVHTECCHGDLLECADDRADLAKYICENQDSISSKLKECCEKPLLEKSHCIAEVENDEMPADLPSLAADFVESKDVCKNYAEAKDVFLGMFLYEYARRHPDYSVVLLLRLAKTYETTLEKCCAAADPHECYAKVFDEFKPLVEEPQNLIKQNCELFEQLGEYKFQNALLVRYTKKVPQVSTPTLVEVSRNLGKVGSKCCKHPEAKRMPCAEDYLSVVLNQLCVLHEKTPVSDRVTKCCTESLVNRRPCFSALEVDETYVPKEFNAETFTFHADICTLSEKERQIKKQTALVELVKHKPKATKEQLKAVMDDFAAFVEKCCKADDKETCFAEEGKKLVAASQAALGLGIGDPVTCLKSGAICHPVFCPRRYKQIGTCGLPGTKCCKKP

SEQ ID NO: 531 - protein, 691 aa, Homo sapiens [sequence omitted]

SEQ ID NO: 532 - protein, 32 aa, Macaca fascicularis
SPKMVRGSGCFGRKMDRISSSSGLGCKVLRRH

SEQ ID NO: 533 - protein, 45 aa, Rattus norvegicus
SQDSAFRIQERLRNSKMAHSSSCFGQKIDRIGAVSRLGCDGLRLF

SEQ ID NO: 534 - protein, 45 aa, Rattus norvegicus; identical to SEQ ID NO: 533

SEQ ID NO: 535 - protein, 32 aa, Homo sapiens; identical to SEQ ID NO: 278

SEQ ID NO: 536 - protein, 32 aa, Homo sapiens; identical to SEQ ID NO: 278

SEQ ID NO: 537 - protein, 32 aa, Homo sapiens; identical to SEQ ID NO: 278

SEQ ID NO: 538 - protein, 165 aa, Homo sapiens [sequence omitted]

SEQ ID NO: 539 - protein, 58 aa, Homo sapiens
SPKMVQGSGCFGRKMDRISSSSGLGCKVLSPKMVQGSGCFGRKMDRISSSSGLGCKVL

SEQ ID NO: 540 - protein, 32 aa, Homo sapiens; identical to SEQ ID NO: 278

SEQ ID NO: 541 - protein, 32 aa, Homo sapiens; identical to SEQ ID NO: 278

SEQ ID NO: 542 - protein, 32 aa, Homo sapiens; identical to SEQ ID NO: 278

SEQ ID NO: 543 - protein, 32 aa, Homo sapiens; identical to SEQ ID NO: 278

SEQ ID NO: 544 - protein, 32 aa, Homo sapiens; identical to SEQ ID NO: 278

SEQ ID NO: 545 - protein, 74 aa, Homo sapiens
TKTESSSRGPYHPSACCFTYTTYKIPRQRIMDYYETNSQCSKPGIVFITKRGHSVCTNPSDKWVQDYIKDMKEN

SEQ ID NO: 546 - protein, 32 aa, Homo sapiens; identical to SEQ ID NO: 278

SEQ ID NO: 547 - protein, 32 aa, Homo sapiens; identical to SEQ ID NO: 278

SEQ ID NO: 548 - protein, 32 aa, Homo sapiens; identical to SEQ ID NO: 278

SEQ ID NO: 549 - protein, 32 aa, Homo sapiens; identical to SEQ ID NO: 278

SEQ ID NO: 550 - protein, 32 aa, Homo sapiens; identical to SEQ ID NO: 278

SEQ ID NO: 551 - protein, 32 aa, Homo sapiens
SAKMVQGSGCFGRKMDRISSSSGLGCKVLRRH

SEQ ID NO: 552 - protein, 32 aa, Homo sapiens
SLKMVQGSGCFGRKMDRISSSSGLGCKVLRRH

SEQ ID NO: 553 - protein, 32 aa, Canis familiaris
SPKMMHKSGCFGRRLDRIGSLSGLGCNVLRKY

SEQ ID NO: 554 - protein, 32 aa, Canis familiaris; identical to SEQ ID NO: 553

SEQ ID NO: 555 - protein, 32 aa, Macaca fascicularis; identical to SEQ ID NO: 532

SEQ ID NO: 556 - protein, 45 aa, Rattus norvegicus; identical to SEQ ID NO: 533

SEQ ID NO: 557 - protein, 45 aa, Rattus norvegicus; identical to SEQ ID NO: 533

SEQ ID NO: 558 - protein, 45 aa, Mus musculus
SQGSTLRVQQRPQNSKVTHISSCFGHKIDRIGSVSRLGCNALKLL

SEQ ID NO: 559 - protein, 82 aa, Homo sapiens
GIGDPVTCLKSGAICHPVFCPRRYKQIGTCGLPGTKCCKKPGIGDPVTCLKSGAICHPVFCPRRYKQIGTCGLPGTKCCKKP

SEQ ID NO: 560 - protein, 32 aa, Homo sapiens; identical to SEQ ID NO: 278

SEQ ID NO: 561 - protein, 41 aa, Homo sapiens
GIGDPVTCLKSGAICHPVFCPRRYKQIGTCGLPGTKCCKKP

SEQ ID NO: 562 - protein, 41 aa, Homo sapiens; identical to SEQ ID NO: 561

SEQ ID NO: 563 - protein, 82 aa, Homo sapiens; identical to SEQ ID NO: 559

SEQ ID NO: 564 - protein, 82 aa, Homo sapiens; identical to SEQ ID NO: 559

SEQ ID NO: 565 - protein, 41 aa, Homo sapiens; identical to SEQ ID NO: 561

SEQ ID NO: 566 - protein, 41 aa, Homo sapiens; identical to SEQ ID NO: 561

SEQ ID NO: 567 - protein, 82 aa, Homo sapiens; identical to SEQ ID NO: 559

SEQ ID NO: 568 - DNA, 112 bp, Macaca fascicularis
gagcgcggatccccgccatcatgaagtgggtaacctttatttcccttctttttctctttagctcggcttactcgaggggtgtgtttcgtcgaagccccaagatggtacgagg

SEQ ID NO: 569 - DNA, 38 bp, Macaca fascicularis; identical to SEQ ID NO: 373

SEQ ID NO: 570 - DNA, 112 bp, Rattus norvegicus
gagcgcagatctccgccatcatgaagtgggtaacctttatttcccttctttttctctttagctcggcttactcgaggggtgtgtttcgtcgatctcaagacagcgccttccg

SEQ ID NO: 571 - DNA, 38 bp, Rattus norvegicus
cggtgctctagattaggctaaggcttctttgcttctag

SEQ ID NO: 572 - DNA, 103 bp, Rattus norvegicus
gagcgcagatctccgccatcatgaaggtctccgtggctgccctctcctgcctcatgcttgttactgcccttggatcccaggcctctcaagacagcgccttccg

SEQ ID NO: 573 - DNA, 38 bp, Rattus norvegicus; identical to SEQ ID NO: 571

SEQ ID NO: 574 - DNA, 40 bp, Homo sapiens
gcgcgcgtcgacaaaagaaagatggtgcaagggtctggct

SEQ ID NO: 575 - DNA, 21 bp, Homo sapiens
catgatcttcaaatggacact

SEQ ID NO: 576 - DNA, 60 bp, Homo sapiens
agccccaagatggtgcaagggtctggctgctttgggaggaagatggaccggatcagctcc

SEQ ID NO: 577 - DNA, 21 bp, Homo sapiens
catgatcttcaaatggacact

SEQ ID NO: 578 - DNA, 43 bp, Homo sapiens
caggagccccttaggcttaagccccaagatggtgcaagggtct

SEQ ID NO: 579 - DNA, 46 bp, Homo sapiens
cctcactcggcgcgccttacagcactttgcagcccaggccactgga

SEQ ID NO: 580 - DNA, 21 bp, Homo sapiens
agaagtgctgcaaggctgacg

SEQ ID NO: 581 - DNA, 20 bp, Homo sapiens
acctgacctacaggaaagag

SEQ ID NO: 582 - DNA, 21 bp, Homo sapiens
agaagtgctgcaaggctgacg

SEQ ID NO: 583 - DNA, 20 bp, Homo sapiens
acctgacctacaggaaagag

SEQ ID NO: 584 - DNA, 21 bp, Homo sapiens
agaagtgctgcaaggctgacg

SEQ ID NO: 585 - DNA, 49 bp, Homo sapiens
cctcactcggcgcgccttacctcagcactttgcagcccaggccactgga

SEQ ID NO: 586 - DNA, 21 bp, Homo sapiens
agaagtgctgcaaggctgacg

SEQ ID NO: 587 - DNA, 52 bp, Homo sapiens
cctcactcggcgcgccttaccgcctcagcactttgcagcccaggccactgga

SEQ ID NO: 588 - DNA, 27 bp, Homo sapiens
gcaagccccaagatggtgcaagggtct

SEQ ID NO: 589 - DNA, 21 bp, Homo sapiens
catgatcttcaaatggacact

SEQ ID NO: 590 - DNA, 61 bp, Homo sapiens
gcaaccaagactgaatcctcctcacggggaccttaccacccctcagcttgctgcttcacct

SEQ ID NO: 591 - DNA, 21 bp, Homo sapiens
catgatcttcaaatggacact

SEQ ID NO: 592 - DNA, 38 bp, Homo sapiens
catgctgccttaggcttaggcatcggcgaccccgtgac

SEQ ID NO: 593 - DNA, 31 bp, Homo sapiens
ctataaggcgcgccctagggcttcttgcagc

SEQ ID NO: 594 - DNA, 21 bp, Homo sapiens
agaagtgctgcaaggctgacg

SEQ ID NO: 595 - DNA, 33 bp, Homo sapiens
gcgcgccctaaggttacagcactttgcagccca

SEQ ID NO: 596 - DNA, 38 bp, Homo sapiens; identical to SEQ ID NO: 592

SEQ ID NO: 597 - DNA, 33 bp, Homo sapiens
ctataaggcgcgccctagggcttcttgcagcac

SEQ ID NO: 598 - DNA, 44 bp, Homo sapiens
ccgccgctcgaggggtgtgtttcgtcgaggcatcggcgaccccg

SEQ ID NO: 599 - DNA, 56 bp, Homo sapiens
agtcccatcgatgagcaacctcactcttgtgtgcatcgggcttcttgcagcacttg

SEQ ID NO: 600 - DNA, 44 bp, Homo sapiens; identical to SEQ ID NO: 598

SEQ ID NO: 601 - DNA, 56 bp, Homo sapiens
agtcccatcgatgagcaacctcactcttgtgtgcatcaggcttcttgcagcatttg

SEQ ID NO: 602 - DNA, 1194 bp, Homo sapiens
atggctccgatatctctgtcgtggctgctccgcttggccaccttctgccatctgactgtcctgctggctggacagcaccacggtgtgacgaaatgcaacatcacgtgcagcaagatgacatcaaagatacctgtagctttgctcatccactatcaacagaaccaggcatcatgcggcaaacgcgcaatcatcttggagacgagacagcacaggctgttctgtgccgacccgaaggagcaatgggtcaaggacgcgatgcagcatctggaccgccaggctgctgccctaactcgaaatggcggcaccttcgagaagcagatcggcgaggtgaagcccaggaccacccctgccgccgggggaatggacgagtctgtggtcctggagcccgaagccacaggcgaaagcagtagcctggagccgactccttcttcccaggaagcacagagggccctggggacctccccagagctgccgacgggcgtgactggttcctcagggaccaggctccccccgacgccaaaggctcaggatggagggcctgtgggcacggagcttttccgagtgcctcccgtctccactgccgccacgtggcagagttctgctccccaccaacctgggcccagcctctgggctgaggcaaagacctctgaggccccgtccacccaggacccctccacccaggcctccactgcgtcctccccagccccagaggagaatgctccgtctgaaggccagcgtgtgtggggtcagggacagagccccaggccagagaactctctggagcgggaggagatgggtcccgtgccagcgcacacggatgccttccaggactgggggcctggcagcatggcccacgtctctgtggtccctgtctcctcagaagggacccccagcagggagccagtggcttcaggcagctggacccctaaggctgaggaacccatccatgccaccatggacccccagaggctgggcgtccttatcactcctgtccctgacgcccaggctgccacccggaggcaggcggtggggctgctggccttccttggcctcctcttctgcctgggggtggccatgttcacctaccagagcctccagggctgccctcgaaagatggcaggagagatggcggagggccttcgctacatcccccggagctgtggtagtaattcatatgtcctggtgcccgtgtga

SEQ ID NO: 603 - DNA, 1194 bp, Homo sapiens; identical to SEQ ID NO: 602

SEQ ID NO: 604 - DNA, 1194 bp, Homo sapiens; identical to SEQ ID NO: 602

SEQ ID NO: 605 - DNA, 1194 bp, Homo sapiens; identical to SEQ ID NO: 602

SEQ ID NO: 606 - DNA, 117 bp, Homo sapiens
cactcccaaggtaccttcacctccgactactccaagtacttggactccagaagagcccaagacttcgtgcaatggttgatgaacaccaagagaaacagaaataacatcgcctagtaa

SEQ ID NO: 607 - DNA, 117 bp, Homo sapiens; identical to SEQ ID NO: 606

SEQ ID NO: 608 - DNA, 117 bp, Homo sapiens; identical to SEQ ID NO: 606

SEQ ID NO: 609 - DNA, 30 bp, Pichia anomala
gctaaggttactatgacttgttctgcttct

SEQ ID NO: 610 - DNA, 117 bp, Homo sapiens; identical to SEQ ID NO: 606

SEQ ID NO: 611 - DNA, 675 bp, Homo sapiens
atgcctgggagccctcggcccgcgccaagctgggtgctgttgctgcggctgctggcgttgctgcggcccccggggctgggtgaggcatgcagctgcgccccggcgcaccctcagcagcacatctgccactcggcacttgtgattcgggccaaaatctccagtgagaaggtagttccggccagtgcagaccctgctgacactgaaaaaatgctccggtatgaaatcaaacagataaagatgttcaaagggtttgagaaagtcaaggatgttcagtatatctatacgccttttgactcttccctctgtggtgtgaaactagaagccaacagccagaagcagtatctcttgactggtcaggtcctcagtgatggaaaagtcttcatccatctgtgcaactacatcgagccctgggaggacctgtccttggtgcagagggaaagtctgaatcatcactaccatctgaactgtggctgccaaatcaccacctgctacacagtaccctgtaccatctcggcccctaacgagtgcctctggacagactggctgttggaacgaaagctctatggttaccaggctcagcattatgtctgtatgaagcatgttgacggcacctgcagctggtaccggggccacctgcctctcaggaaggagtttgttgacatcgttcagccctag

SEQ ID NO: 612 - DNA, 675 bp, Homo sapiens; identical to SEQ ID NO: 611

SEQ ID NO: 613 - DNA, 108 bp, Homo sapiens
taccccatcaaacccgaggctcccggcgaagacgcctcgccggaggagctgaaccgctactacgcctccctgcgccactacctcaacctggtcacccggcagcggtat

SEQ ID NO: 614 - DNA, 108 bp, Homo sapiens; identical to SEQ ID NO: 613

SEQ ID NO: 615 - DNA, 156 bp, Homo sapiens
tacagacaatctatgaacaacttccaaggtttgagatctttcggttgtagattcggtacttgtactgttcaaaagttggctcaccaaatttaccaattcactgataaggataaggataacgttgctccaagatctaagatttctccacaaggttac

SEQ ID NO: 616 - DNA, 108 bp, Homo sapiens
cactcccaaggtaccttcacctccgactactccaagtacttggactccagaagagcccaagacttcgtgcaatggttgatgaacaccaagagaaacagaaataacatc

SEQ ID NO: 617 - DNA, 84 bp, Homo sapiens
ggctccagcttcctgagccctgaacaccagagagtccagcagagaaaggagtcgaagaagccaccagccaagctgcagccccga

SEQ ID NO: 618 - DNA, 84 bp, Homo sapiens; identical to SEQ ID NO: 617

SEQ ID NO: 619 - DNA, 111 bp, Homo sapiens
gcctgtgacactgccacctgtgtgactcatcggctggcaggcttgctgagcagatcagggggtgtggtgaagaacaactttgtgcccaccaatgtgggttccaaagccttt

SEQ ID NO: 620 - DNA, 111 bp, Homo sapiens; identical to SEQ ID NO: 619

SEQ ID NO: 621 - DNA, 111 bp, Homo sapiens; identical to SEQ ID NO: 619

SEQ ID NO: 622 - DNA, 111 bp, Homo sapiens; identical to SEQ ID NO: 619

SEQ ID NO: 623 - DNA, 462 bp, Homo sapiens
atgggaaaaatcagcagtcttccaacccaattatttaagtgctgcttttgtgatttcttgaaggtgaagatgcacaccatgtcctcctcgcatctcttctacctggcgctgtgcctgctcaccttcaccagctctgccacggctggaccggagacgctctgcggggctgagctggtggatgctcttcagttcgtgtgtggagacaggggcttttatttcaacaagcccacagggtatggctccagcagtcggagggcgcctcagacaggcatcgtggatgagtgctgcttccggagctgtgatctaaggaggctggagatgtattgcgcacccctcaagcctgccaagtcagctcgctctgtccgtgcccagcgccacaccgacatgcccaagacccagaaggaagtacatttgaagaacgcaagtagagggagtgcaggaaacaagaactacaggatgtag

SEQ ID NO: 624 - DNA, 462 bp, Homo sapiens; identical to SEQ ID NO: 623

SEQ ID NO: 625 - DNA, 108 bp, Homo sapiens; identical to SEQ ID NO: 616

SEQ ID NO: 626 - DNA, 1410 bp, Influenza A virus
atgaatccaaatcagaagataacaaccattggatcaatctgtatggtaattggaatagttagcttgatgttacaaattgggaacataatctcaatatgggttagtcattcaattcaaacagggaatcaacaccaggctgaaccatgcaatcaaagcattattacttatgaaaacaacacctgggtaaaccagacatatgtcaacatcagcaataccaattttcttactgagaaagctgtggcttcagtaacattagcgggcaattcatctctttgccccattagtggatgggctgtatacagtaaggacaacggtataagaatcggttccaagggggatgtgtttgttataagagagccgttcatctcatgctcccacttggaatgcagaactttctttttgactcagggagccttgctgaatgacaagcattctaatgggaccgtcaaagacagaagccctcacagaacattaatgagttgtcccgtgggtgaggctccttccccatacaactcgaggtttgagtctgttgcttggtcggcaagtgcttgtcatgatggcactagttggttgacaattggaatttctggcccagacaatggggctgtggctgtattgaaatacaatggcataataacagacactatcaagagttggaggaacaacataatgagaactcaagagtctgaatgtgcatgtgtaaatggctcttgctttactgttatgactgatggaccaagtaatgggcaggcttcatacaaaatcttcagaatagaaaaagggaaagtagttaaatcagccgaattaaatgcccctaattatcactatgaggagtgctcctgttatcctgatgctggagaaatcacatgtgtgtgcagggataactggcatggctcaaatcggccatgggtatctttcaatcaaaatttggagtatcgaataggatatatatgcagtggagttttcggagacaatccacgccccaatgatgggacaggcagttgtggtccggtgtcccctaaaggggcatatggaataaaagggttctcatttaaatacggcaatggtgtttggatcgggagaaccaaaagcactaattccaggagcggctttgaaatgatttgggatccaaatggatggactggtacggacagtaatttttcagtaaagcaagatattgtagctataaccgattggtcaggatatagcgggagttttgtccagcatccagaactgacaggattagattgcataagaccttgtttctgggttgagctaatcagagggcggcccaaagagagcacaatttggactagtgggagcagcatatccttttgtggtgtaaatagtgacactgtgggttggtcttggccagacggtgctgagttgccattcaccattgacaagtag

SEQ ID NO: 627 - DNA, 1410 bp, Influenza A virus; identical to SEQ ID NO: 626

SEQ ID NO: 628 - DNA, 1708 bp, Influenza A virus
atggagaaaatagtgcttctttttgcaatagtcagtcttgttaaaagtgatcagatttgcattggttaccatgcaaacaactcgacagagcaggttgacacaataatggaaaagaacgttactgttacacatgcccaagacatactggaaaagacacacaacgggaagctctgcgatctagatggagtgaagcctctaattttgagagattgtagtgtagctggatggctcctcggaaacccaatgtgtgacgaattcatcaatgtgccggaatggtcttacatagtggagaaggccaatccagccaatgacctctgttacccaggggatttcaacgactatgaagaattgaaacacctattgagcagaataaaccattttgagaaaattcagatcatccccaaaaattcttggtccagtcatgaagcctcattaggggtgagctcagcatgtccataccaaggaaagtcctcctttttcaggaatgtggtatggcttatcaaaaagaacaatgcatacccaacaataaagaggagctacaataataccaaccaagaagatcttttggtattgtgggggattcaccatcctaatgatgcggcagagcagactaggctctatcaaaacccaaccacctacatttccgttgggacatcaacactaaaccagagattggtaccaaaaatagctactagatccaaagtaaacgggcaaaatggaaggatggagttcttctggacaattttaaaaccgaatgatgcaatcaacttcgagagcaatggaaatttcattgctccagaatatgcatacaaaattgtcaagaaaggggactcagcaattatgaaaagtgaattggaatatggtaactgcaacaccaagtgtcaaactccaatgggggcgataaactctagtatgccattccacaatatacaccctctcaccatcggggaatgccccaaatatgtgaaatcaaacagattagtccttgcgactgggctcagaaatagccctcaaagagagagaagaagaaaaaagagaggattatttggagctatagcaggttttatagagggaggatggcagggaatggtagatggttggtatgggtaccaccatagcaatgagcaggggagtgggtacgctgcagacaaagaatccactcaaaaggcaatagatggagtcaccaataaggtcaactcgatcattgacaaaatgaacactcagtttgaggccgttggaagggaatttaataacttagaaaggagaatagagaatttaaacaagaagatggaagacggattcctagatgtctggacttataatgctgaacttctggttctcatggaaaatgagagaactctagactttcatgactcaaatgtcaagaacctttacgacaaggtccgactacagcttagggataatgcaaaggagctgggtaacggttgtttcgagttctatcacaaatgtgataatgaatgtatggaaagtgtaagaaacggaacgtatgactacccgcagtattcagaagaagcaagactaaaaagagaggaaataagtggagtaaaattggagtcaataggaacttaccaaatactgtcaatttattctacagtggcgagttccctagcactggcaatcatggtagctggtctatctttatggatgtgctccaatgggtcgttacaatgcagaatttgcatttaag

SEQ ID NO: 629 - DNA, 1708 bp, Influenza A virus; identical to SEQ ID NO: 628

SEQ ID NO: 630 - DNA, 1809 bp, Homo sapiens
atgcatagcaaagtcacaatcatatgcatcagatttctcttttggtttcttttgctctgcatgcttattgggaagtcacatactgaagatgacatcataattgcaacaaagaatggaaaagtcagagggatgaacttgacagtttttggtggcacggtaacagcctttcttggaattccctatgcacagccacctcttggtagacttcgattcaaaaagccacagtctctgaccaagtggtctgatatttggaatgccacaaaatatgcaaattcttgctgtcagaacatagatcaaagttttccaggcttccatggatcagagatgtggaacccaaacactgacctcagtgaagactgtttatatctaaatgtatggattccagcacctaaaccaaaaaatgccactgtattgatatggatttatggtggtggttttcaaactggaacatcatctttacatgtttatgatggcaagtttctggctcgggttgaaagagttattgtagtgtcaatgaactatagggtgggtgccctaggattcttagctttgccaggaaatcctgaggctccagggaacatgggtttatttgatcaacagttggctcttcagtgggttcaaaaaaatatagcagcctttggtggaaatcctaaaagtgtaactctctttggagaaagtgcaggagcagcttcagttagcctgcatttgctttctcctggaagccattcattgttcaccagagccattctgcaaagtggatcctttaatgctccttgggcggtaacatctctttatgaagctaggaacagaacgttgaacttagctaaattgactggttgctctagagagaatgagactgaaataatcaagtgtcttagaaataaagatccccaagaaattcttctgaatgaagcatttgttgtcccctatgggactcctttgtcagtaaactttggtccgaccgtggatggtgattttctcactgacatgccagacatattacttgaacttggacaatttaaaaaaacccagattttggtgggtgttaataaagatgaagggacagcttttttagtctatggtgctcctggcttcagcaaagataacaatagtatcataactagaaaagaatttcaggaaggtttaaaaatattttttccaggagtgagtgagtttggaaaggaatccatcctttttcattacacagactgggtagatgatcagagacctgaaaactaccgtgaggccttgggtgatgttgttggggattataatttcatatgccctgccttggagttcaccaagaagttctcagaatggggaaataatgcctttttctactattttgaacaccgatcctccaaacttccgtggccagaatggatgggagtgatgcatggctatgaaattgaatttgtctttggtttacctctggaaagaagagataattacacaaaagccgaggaaattttgagtagatccatagtgaaacggtgggcaaattttgcaaaatatgggaatccaaatgagactcagaacaatagcacaagctggcctgtcttcaaaagcactgaacaaaaatatctaaccttgaatacagagtcaacaagaataatgacgaaactacgtgctcaacaatgtcgattctggacatcattttttccaaaagtcttggaaatgacaggaaatattgatgaagcagaatgggagtggaaagcaggattccatcgctggaacaattacatgatggactggaaaaatcaatttaacgattacactagcaagaaagaaagttgtgtgggtctctaa

SEQ ID NO: 631 - DNA, 1809 bp, Homo sapiens; identical to SEQ ID NO: 630

SEQ ID NO: 632 - DNA, 156 bp, Homo sapiens; identical to SEQ ID NO: 615

SEQ ID NO: 633 - DNA, 156 bp, Homo sapiens; identical to SEQ ID NO: 615

SEQ ID NO: 634 - DNA, 108 bp, Homo sapiens; identical to SEQ ID NO: 613

SEQ ID NO: 635 - DNA, 108 bp, Homo sapiens; identical to SEQ ID NO: 613

SEQ ID NO: 636 - DNA, 501 bp, Homo sapiens
tgtgatctgcctcaaacccacagcctgggttctagaaggaccttgatgctcctggcacagatgaggagaatctctcttttctcctgcttgaaggacagacatgactttggatttccccaggaggagtttggcaaccagttccaaaaggctgaaaccatccctgtcctccatgagatgatccagcagatcttcaatctcttcagcacaaaggactcatctgctgcttgggatgagaccctcctagacaaattctacactgaactctaccagcagctgaatgacctggaagcctgtgtgatacagggggtgggggtgacagagactcccctgatgaaggaggactccattctggctgtgaggaaatacttccaaagaatcactctctatctgaaagagaagaaatacagcccttgtgcctgggaggttgtcagagcagaaatcatgagatctttttctttgtcaacaaacttgcaagaaagtttaagaagtaaggaataataa

SEQ ID NO: 637 - DNA, 501 bp, Homo sapiens; identical to SEQ ID NO: 636

SEQ ID NO: 638 - DNA, 501 bp, Homo sapiens; identical to SEQ ID NO: 636

SEQ ID NO: 639 - DNA, 501 bp, Homo sapiens; identical to SEQ ID NO: 636

SEQ ID NO: 640 - DNA, 501 bp, Homo sapiens; identical to SEQ ID NO: 636

SEQ ID NO: 641 - protein, 685 aa, Homo sapiens
MKWVSFISLLFLFSSAYSRSLDKRDAHKSEVAHRFKDLGEENFKALVLIAFAQYLQQCPFEDHVKLVNEVTEFAKTCVADESAENCDKSLHTLFGDKLCTVATLRETYGEMADCCAKQEPERNECFLQHKDDNPNLPRLVRPEVDVMCTAFHDNEETFLKKYLYEIARRHPYFYAPELLFFAKRYKAAFTECCQAADKAACLLPKLDELRDEGKASSAKQRLKCASLQKFGERAFKAWAVARLSQRFPKAEFAEVSKLVTDLTKVHTECCHGDLLECADDRADLAKYICENQDSISSKLKECCEKPLLEKSHCIAEVENDEMPADLPSLAADFVESKDVCKNYAEAKDVFLGMFLYEYARRHPDYSVVLLLRLAKTYETTLEKCCAAADPHECYAKVFDEFKPLVEEPQNLIKQNCELFEQLGEYKFQNALLVRYTKKVPQVSTPTLVEVSRNLGKVGSKCCKHPEAKRMPCAEDYLSVVLNQLCVLHEKTPVSDRVTKCCTESLVNRRPCFSALEVDETYVPKEFNAETFTFHADICTLSEKERQIKKQTALVELVKHKPKATKEQLKAVMDDFAAFVEKCCKADDKETCFAEEGKKLVAASQAALGLQHHGVTKCNITCSKMTSKIPVALLIHYQQNQASCGKRAIILETRQHRLFCADPKEQWVKDAMQHLDRQAAALTRNG

SEQ ID NO: 642 - protein, 685 aa, Homo sapiens
MKWVSFISLLFLFSSAYSRSLDKRQHHGVTKCNITCSKMTSKIPVALLIHYQQNQASCGKRAIILETRQHRLFCADPKEQWVKDAMQHLDRQAAALTRNGDAHKSEVAHRFKDLGEENFKALVLIAFAQYLQQCPFEDHVKLVNEVTEFAKTCVADESAENCDKSLHTLFGDKLCTVATLRETYGEMADCCAKQEPERNECFLQHKDDNPNLPRLVRPEVDVMCTAFHDNEETFLKKYLYEIARRHPYFYAPELLFFAKRYKAAFTECCQAADKAACLLPKLDELRDEGKASSAKQRLKCASLQKFGERAFKAWAVARLSQRFPKAEFAEVSKLVTDLTKVHTECCHGDLLECADDRADLAKYICENQDSISSKLKECCEKPLLEKSHCIAEVENDEMPADLPSLAADFVESKDVCKNYAEAKDVFLGMFLYEYARRHPDYSVVLLLRLAKTYETTLEKCCAAADPHECYAKVFDEFKPLVEEPQNLIKQNCELFEQLGEYKFQNALLVRYTKKVPQVSTPTLVEVSRNLGKVGSKCCKHPEAKRMPCAEDYLSVVLNQLCVLHEKTPVSDRVTKCCTESLVNRRPCFSALEVDETYVPKEFNAETFTFHADICTLSEKERQIKKQTALVELVKHKPKATKEQLKAVMDDFAAFVEKCCKADDKETCFAEEGKKLVAASQAALGL

SEQ ID NO: 643 - protein, 685 aa, Homo sapiens
MKWVSFISLLFLFSSAYSRSLDKRQHHGVTKCNITCSKMTSKIPVALLIHYQQNQASCGKRAIILETRQHQLFCADPKEQWVKDAMQHLDRQAAALTRNGDAHKSEVAHRFKDLGEENFKALVLIAFAQYLQQCPFEDHVKLVNEVTEFAKTCVADESAENCDKSLHTLFGDKLCTVATLRETYGEMADCCAKQEPERNECFLQHKDDNPNLPRLVRPEVDVMCTAFHDNEETFLKKYLYEIARRHPYFYAPELLFFAKRYKAAFTECCQAADKAACLLPKLDELRDEGKASSAKQRLKCASLQKFGERAFKAWAVARLSQRFPKAEFAEVSKLVTDLTKVHTECCHGDLLECADDRADLAKYICENQDSISSKLKECCEKPLLEKSHCIAEVENDEMPADLPSLAADFVESKDVCKNYAEAKDVFLGMFLYEYARRHPDYSVVLLLRLAKTYETTLEKCCAAADPHECYAKVFDEFKPLVEEPQNLIKQNCELFEQLGEYKFQNALLVRYTKKVPQVSTPTLVEVSRNLGKVGSKCCKHPEAKRMPCAEDYLSVVLNQLCVLHEKTPVSDRVTKCCTESLVNRRPCFSALEVDETYVPKEFNAETFTFHADICTLSEKERQIKKQTALVELVKHKPKATKEQLKAVMDDFAAFVEKCCKADDKETCFAEEGKKLVAASQAALGL

SEQ ID NO: 644 - protein, 681 aa, Homo sapiens
MKWVSFISLLFLFSSAYSRSLDKRVTKCNITCSKMTSKIPVALLIHYQQNQASCGKRAIILETRQHRLFCADPKEQWVKDAMQHLDRQAAALTRNGDAHKSEVAHRFKDLGEENFKALVLIAFAQYLQQCPFEDHVKLVNEVTEFAKTCVADESAENCDKSLHTLFGDKLCTVATLRETYGEMADCCAKQEPERNECFLQHKDDNPNLPRLVRPEVDVMCTAFHDNEETFLKKYLYEIARRHPYFYAPELLFFAKRYKAAFTECCQAADKAACLLPKLDELRDEGKASSAKQRLKCASLQKFGERAFKAWAVARLSQRFPKAEFAEVSKLVTDLTKVHTECCHGDLLECADDRADLAKYICENQDSISSKLKECCEKPLLEKSHCIAEVENDEMPADLPSLAADFVESKDVCKNYAEAKDVFLGMFLYEYARRHPDYSVVLLLRLAKTYETTLEKCCAAADPHECYAKVFDEFKPLVEEPQNLIKQNCELFEQLGEYKFQNALLVRYTKKVPQVSTPTLVEVSRNLGKVGSKCCKHPEAKRMPCAEDYLSVVLNQLCVLHEKTPVSDRVTKCCTESLVNRRPCFSALEVDETYVPKEFNAETFTFHADICTLSEKERQIKKQTALVELVKHKPKATKEQLKAVMDDFAAFVEKCCKADDKETCFAEEGKKLVAASQAALGL

SEQ ID NO: 645 - protein, 641 aa, Homo sapiens
MLLQAFLFLLAGFAAKISAHSQGTFTSDYSKYLDSRRAQDFVQWLMNTKRNRNNIADAHKSEVAHRFKDLGEENFKALVLIAFAQYLQQCPFEDHVKLVNEVTEFAKTCVADESAENCDKSLHTLFGDKLCTVATLRETYGEMADCCAKQEPERNECFLQHKDDNPNLPRLVRPEVDVMCTAFHDNEETFLKKYLYEIARRHPYFYAPELLFFAKRYKAAFTECCQAADKAACLLPKLDELRDEGKASSAKQRLKCASLQKFGERAFKAWAVARLSQRFPKAEFAEVSKLVTDLTKVHTECCHGDLLECADDRADLAKYICENQDSISSKLKECCEKPLLEKSHCIAEVENDEMPADLPSLAADFVESKDVCKNYAEAKDVFLGMFLYEYARRHPDYSVVLLLRLAKTYETTLEKCCAAADPHECYAKVFDEFKPLVEEPQNLIKQNCELFEQLGEYKFQNALLVRYTKKVPQVSTPTLVEVSRNLGKVGSKCCKHPEAKRMPCAEDYLSVVLNQLCVLHEKTPVSDRVTKCCTESLVNRRPCFSALEVDETYVPKEFNAETFTFHADICTLSEKERQIKKQTALVELVKHKPKATKEQLKAVMDDFAAFVEKCCKADDKETCFAEEGKKLVAASQAALGL

SEQ ID NO: 646 - protein, 691 aa, Homo sapiens
MLLQAFLFLLAGFAAKISAIKPEAPGEDASPEELNRYYASLRHYLNLVTRQRYDAHKSEVAHRFKDLGEDAHKSEVAHRFKDLGEENFKALVLIAFAQYLQQCPFEDHVKLVNEVTEFAKTCVADESAENCDKSLHTLFGDKLCTVATLRETYGEMADCCAKQEPERNECFLQHKDDNPNLPRLVRPEVDVMCTAFHDNEETFLKKYLYEIARRHPYFYAPELLFFAKRYKAAFTECCQAADKAACLLPKLDELRDEGKASSAKQRLKCASLQKFGERAFKAWAVARLSQRFPKAEFAEVSKLVTDLTKVHTECCHGDLLECADDRADLAKYICENQDSISSKLKECCEKPLLEKSHCIAEVENDEMPADLPSLAADFVESKDVCKNYAEAKDVFLGMFLYEYARRHPDYSVVLLLRLAKTYETTLEKCCAAADPHECYAKVFDEFKPLVEEPQNLIKQNCELFEQLGEYKFQNALLVRYTKKVPQVSTPTLVEVSRNLGKVGSKCCKHPEAKRMPCAEDYLSVVLNQLCVLHEKTPVSDRVTKCCTESLVNRRPCFSALEVDETYVPKEFNAETFTFHADICTLSEKERQIKKQTALVELVKHKPKATKEQLKAVMDDFAAFVEKCCKADDKETCFAEEGKKLVAASQAALGLHSQGTFTSDYSKYLDSRRAQDFVQWLMNTKRNRNNIA

SEQ ID NO: 647 - protein, 646 aa, Homo sapiens
MKWVTFISLLFLFSSAYSRGVFRRDAHKSEVAHRFKDLGEENFKALVLIAFAQYLQQCPFEDHVKLVNEVTEFAKTCVADESAENCDKSLHTLFGDKLCTVATLRETYGEMADCCAKQEPERNECFLQHKDDNPNLPRLVRPEVDVMCTAFHDNEETFLKKYLYEIARRHPYFYAPELLFFAKRYKAAFTECCQAADKAACLLPKLDELRDEGKASSAKQRLKCASLQKFGERAFKAWAVARLSQRFPKAEFAEVSKLVTDLTKVHTECCHGDLLECADDRADLAKYICENQDSISSKLKECCEKPLLEKSHCIAEVENDEMPADLPSLAADFVESKDVCKNYAEAKDVFLGMFLYEYARRHPDYSVVLLLRLAKTYETTLEKCCAAADPHECYAKVFDEFKPLVEEPQNLIKQNCELFEQLGEYKFQNALLVRYTKKVPQVSTPTLVEVSRNLGKVGSKCCKHPEAKRMPCAEDYLSVVLNQLCVLHEKTPVSDRVTKCCTESLVNRRPCFSALEVDETYVPKEFNAETFTFHADICTLSEKERQIKKQTALVELVKHKPKATKEQLKAVMDDFAAFVEKCCKADDKETCFAEEGKKLVAASQAALGLHSQGTFTSDYSKYLDSRRAQDFVQWLMNTKRNRNNIA

SEQ ID NO: 648 - protein, 630 aa, Artificial sequence
  Invertase signal sequence followed by killer toxin peptide fused via a 16 amino acid linker from HSA (amino acids 25-40) to mature HSA.
MLLQAFLFLLAGFAAKISAAKVTMTCSASDAHKSEVAHRFKDLGEDAHKSEVAHRFKDLGEENFKALVLIAFAQYLQQCPFEDHVKLVNEVTEFAKTCVADESAENCDKSLHTLFGDKLCTVATLRETYGEMADCCAKQEPERNECFLQHKDDNPNLPRLVRPEVDVMCTAFHDNEETFLKKYLYEIARRHPYFYAPELLFFAKRYKAAFTECCQAADKAACLLPKLDELRDEGKASSAKQRLKCASLQKFGERAFKAWAVARLSQRFPKAEFAEVSKLVTDLTKVHTECCHGDLLECADDRADLAKYICENQDSISSKLKECCEKPLLEKSHCIAEVENDEMPADLPSLAADFVESKDVCKNYAEAKDVFLGMFLYEYARRHPDYSVVLLLRLAKTYETTLEKCCAAADPHECYAKVFDEFKPLVEEPQNLIKQNCELFEQLGEYKFQNALLVRYTKKVPQVSTPTLVEVSRNLGKVGSKCCKHPEAKRMPCAEDYLSVVLNQLCVLHEKTPVSDRVTKCCTESLVNRRPCFSALEVDETYVPKEFNAETFTFHADICTLSEKERQIKKQTALVELVKHKPKATKEQLKAVMDDFAAFVEKCCKADDKETCFAEEGKKLVAASQAALGL

SEQ ID NO: 649 - protein, 646 aa, Homo sapiens; identical to SEQ ID NO: 647

SEQ ID NO: 650 - protein, 737 aa, Homo sapiens [sequence omitted]

SEQ ID NO: 651 - protein, 737 aa, Homo sapiens
MKWVSFISLLFLFSSAYSRSLDKRDAHKSEVAHRFKDLGEENFKALVLIAFAQYLQQCPFEDHVKLVNEVTEFAKTCVADESAENCDKSLHTLFGDKLCTVATLRETYGEMADCCAKQEPERNECFLQHKDDNPNLPRLVRPEVDVMCTAFHDNEETFLKKYLYEIARRHPYFYAPELLFFAKRYKAAFTECCQAADKAACLLPKLDELRDEGKASSAKQRLKCASLQKFGERAFKAWAVARLSQRFPKAEFAEVSKLVTDLTKVHTECCHGDLLECADDRADLAKYICENQDSISSKLKECCEKPLLEKSHCIAEVENDEMPADLPSLAADFVESKDVCKNYAEAKDVFLGMFLYEYARRHPDYSVVLLLRLAKTYETTLEKCCAAADPHECYAKVFDEFKPLVEEPQNLIKQNCELFEQLGEYKFQNALLVRYTKKVPQVSTPTLVEVSRNLGKVGSKCCKHPEAKRMPCAEDYLSVVLNQLCVLHEKTPVSDRVTKCCTESLVNRRPCFSALEVDETYVPKEFNAETFTFHADICTLSEKERQIKKQTALVELVKHKPKATKEQLKAVMDDFAAFVEKCCKADDKETCFAEEGKKLVAASQAALGLCSCAPAHPQQHICHSALVIRAKISSEKVVPASADPADTEKMLRYEIKQIKMFKGFEKVKDVQYIYTPFDSSLCGVKLEANSQKQYLLTGQVLSDGKVFIHLCNYIEPWEDLSLVQRESLNHHYHLNCG

SEQ ID NO: 652 - protein, 677 aa, Homo sapiens
MKWVTFISLLFLFSSAYSRGVFRRDAHKSEVAHRFKDLGEENFKALVLIAFAQYLQQCPFEDHVKLVNEVTEFAKTCVADESAENCDKSLHTLFGDKLCTVATLRETYGEMADCCAKQEPERNECFLQHKDDNPNLPRLVRPEVDVMCTAFHDNEETFLKKYLYEIARRHPYFYAPELLFFAKRYKAAFTECCQAADKAACLLPKLDELRDEGKASSAKQRLKCASLQKFGERAFKAWAVARLSQRFPKAEFAEVSKLVTDLTKVHTECCHGDLLECADDRADLAKYICENQDSISSKLKECCEKPLLEKSHCIAEVENDEMPADLPSLAADFVESKDVCKNYAEAKDVFLGMFLYEYARRHPDYSVVLLLRLAKTYETTLEKCCAAADPHECYAKVFDEFKPLVEEPQNLIKQNCELFEQLGEYKFQNALLVRYTKKVPQVSTPTLVEVSRNLGKVGSKCCKHPEAKRMPCAEDYLSVVLNQLCVLHEKTPVSDRVTKCCTESLVNRRPCFSALEVDETYVPKEFNAETFTFHADICTLSEKERQIKKQTALVELVKHKPKATKEQLKAVMDDFAAFVEKCCKADDKETCFAEEGKKLVAASQAALGLIKPEAPGEDASPEELNRYYASLRHYLNLVTRQRYIKPEAPGEDASPEELNRYYASLRHYLNLVTRQRY

SEQ ID NO: 653 - protein, 642 aa, Homo sapiens
MRPTWAWWLFLVLLLALWAPARGIKPEAPGEDASPEELNRYYASLRHYLNLVTRQRYDAHKSEVAHRFKDLGEENFKALVLIAFAQYLQQCPFEDHVKLVNEVTEFAKTCVADESAENCDKSLHTLFGDKLCTVATLRETYGEMADCCAKQEPERNECFLQHKDDNPNLPRLVRPEVDVMCTAFHDNEETFLKKYLYEIARRHPYFYAPELLFFAKRYKAAFTECCQAADKAACLLPKLDELRDEGKASSAKQRLKCASLQKFGERAFKAWAVARLSQRFPKAEFAEVSKLVTDLTKVHTECCHGDLLECADDRADLAKYICENQDSISSKLKECCEKPLLEKSHCIAEVENDEMPADLPSLAADFVESKDVCKNYAEAKDVFLGMFLYEYARRHPDYSVVLLLRLAKTYETTLEKCCAAADPHECYAKVFDEFKPLVEEPQNLIKQNCELFEQLGEYKFQNALLVRYTKKVPQVSTPTLVEVSRNLGKVGSKCCKHPEAKRMPCAEDYLSVVLNQLCVLHEKTPVSDRVTKCCTESLVNRRPCFSALEVDETYVPKEFNAETFTFHADICTLSEKERQIKKQTALVELVKHKPKATKEQLKAVMDDFAAFVEKCCKADDKETCFAEEGKKLVAASQAALGL

SEQ ID NO: 654 - protein, 661 aa, Homo sapiens
MKWVSFISLLFLFSSAYSGSLDKRYRQSMNNFQGLRSFGCRFGTCTVQKLAHQIYQFTDKDKDNVAPRSKISPQGYDAHKSEVAHRFKDLGEENFKALVLIAFAQYLQQCPFEDHVKLVNEVTEFAKTCVADESAENCDKSLHTLFGDKLCTVATLRETYGEMADCCAKQEPERNECFLQHKDDNPNLPRLVRPEVDVMCTAFHDNEETFLKKYLYEIARRHPYFYAPELLFFAKRYKAAFTECCQAADKAACLLPKLDELRDEGKASSAKQRLKCASLQKFGERAFKAWAVARLSQRFPKAEFAEVSKLVTDLTKVHTECCHGDLLECADDRADLAKYICENQDSISSKLKECCEKPLLEKSHCIAEVENDEMPADLPSLAADFVESKDVCKNYAEAKDVFLGMFLYEYARRHPDYSVVLLLRLAKTYETTLEKCCAAADPHECYAKVFDEFKPLVEEPQNLIKQNCELFEQLGEYKFQNALLVRYTKKVPQVSTPTLVEVSRNLGKVGSKCCKHPEAKRMPCAEDYLSVVLNQLCVLHEKTPVSDRVTKCCTESLVNRRPCFSALEVDETYVPKEFNAETFTFHADICTLSEKERQIKKQTALVELVKHKPKATKEQLKAVMDDFAAFVEKCCKADDKETCFAEEGKKLVAASQAALGL

SEQ ID NO: 655 - protein, 645 aa, Homo sapiens
MRPTWAWWLFLVLLLALWAPARGHSQGTFTSDYSKYLDSRRAQDFVQWLMNTKRNRNNIADAHKSEVAHRFKDLGEENFKALVLIAFAQYLQQCPFEDHVKLVNEVTEFAKTCVADESAENCDKSLHTLFGDKLCTVATLRETYGEMADCCAKQEPERNECFLQHKDDNPNLPRLVRPEVDVMCTAFHDNEETFLKKYLYEIARRHPYFYAPELLFFAKRYKAAFTECCQAADKAACLLPKLDELRDEGKASSAKQRLKCASLQKFGERAFKAWAVARLSQRFPKAEFAEVSKLVTDLTKVHTECCHGDLLECADDRADLAKYICENQDSISSKLKECCEKPLLEKSHCIAEVENDEMPADLPSLAADFVESKDVCKNYAEAKDVFLGMFLYEYARRHPDYSVVLLLRLAKTYETTLEKCCAAADPHECYAKVFDEFKPLVEEPQNLIKQNCELFEQLGEYKFQNALLVRYTKKVPQVSTPTLVEVSRNLGKVGSKCCKHPEAKRMPCAEDYLSVVLNQLCVLHEKTPVSDRVTKCCTESLVNRRPCFSALEVDETYVPKEFNAETFTFHADICTLSEKERQIKKQTALVELVKHKPKATKEQLKAVMDDFAAFVEKCCKADDKETCFAEEGKKLVAASQAALGL

SEQ ID NO: 656 - protein, 637 aa, Homo sapiens
MKWVTFISLLFLFSSAYSRGVFRRDAHKSEVAHRFKDLGEENFKALVLIAFAQYLQQCPFEDHVKLVNEVTEFAKTCVADESAENCDKSLHTLFGDKLCTVATLRETYGEMADCCAKQEPERNECFLQHKDDNPNLPRLVRPEVDVMCTAFHDNEETFLKKYLYEIARRHPYFYAPELLFFAKRYKAAFTECCQAADKAACLLPKLDELRDEGKASSAKQRLKCASLQKFGERAFKAWAVARLSQRFPKAEFAEVSKLVTDLTKVHTECCHGDLLECADDRADLAKYICENQDSISSKLKECCEKPLLEKSHCIAEVENDEMPADLPSLAADFVESKDVCKNYAEAKDVFLGMFLYEYARRHPDYSVVLLLRLAKTYETTLEKCCAAADPHECYAKVFDEFKPLVEEPQNLIKQNCELFEQLGEYKFQNALLVRYTKKVPQVSTPTLVEVSRNLGKVGSKCCKHPEAKRMPCAEDYLSVVLNQLCVLHEKTPVSDRVTKCCTESLVNRRPCFSALEVDETYVPKEFNAETFTFHADICTLSEKERQIKKQTALVELVKHKPKATKEQLKAVMDDFAAFVEKCCKADDKETCFAEEGKKLVAASQAALGLGSSFLSPEHQRVQQRKESKKPPAKLQPR

SEQ ID NO: 657 - protein, 637 aa, Homo sapiens; identical to SEQ ID NO: 656

SEQ ID NO: 658 - protein, 639 aa, Homo sapiens
MKWVSFISLLFLFSSAYSRSLDKRVTHRLAGLLSRSGGVVKNNFVPTNVGSKAFDAHKSEVAHRFKDLGEENFKALVLIAFAQYLQQCPFEDHVKLVNEVTEFAKTCVADESAENCDKSLHTLFGDKLCTVATLRETYGEMADCCAKQEPERNECFLQHKDDNPNLPRLVRPEVDVMCTAFHDNEETFLKKYLYEIARRHPYFYAPELLFFAKRYKAAFTECCQAADKAACLLPKLDELRDEGKASSAKQRLKCASLQKFGERAFKAWAVARLSQRFPKAEFAEVSKLVTDLTKVHTECCHGDLLECADDRADLAKYICENQDSISSKLKECCEKPLLEKSHCIAEVENDEMPADLPSLAADFVESKDVCKNYAEAKDVFLGMFLYEYARRHPDYSVVLLLRLAKTYETTLEKCCAAADPHECYAKVFDEFKPLVEEPQNLIKQNCELFEQLGEYKFQNALLVRYTKKVPQVSTPTLVEVSRNLGKVGSKCCKHPEAKRMPCAEDYLSVVLNQLCVLHEKTPVSDRVTKCCTESLVNRRPCFSALEVDETYVPKEFNAETFTFHADICTLSEKERQIKKQTALVELVKHKPKATKEQLKAVMDDFAAFVEKCCKADDKETCFAEEGKKLVAASQAALGL

SEQ ID NO: 659 - protein, 639 aa, Homo sapiens
MKWVSFISLLFLFSSAYSRSLDKRDAHKSEVAHRFKDLGEENFKALVLIAFAQYLQQCPFEDHVKLVNEVTEFAKTCVADESAENCDKSLHTLFGDKLCTVATLRETYGEMADCCAKQEPERNECFLQHKDDNPNLPRLVRPEVDVMCTAFHDNEETFLKKYLYEIARRHPYFYAPELLFFAKRYKAAFTECCQAADKAACLLPKLDELRDEGKASSAKQRLKCASLQKFGERAFKAWAVARLSQRFPKAEFAEVSKLVTDLTKVHTECCHGDLLECADDRADLAKYICENQDSISSKLKECCEKPLLEKSHCIAEVENDEMPADLPSLAADFVESKDVCKNYAEAKDVFLGMFLYEYARRHPDYSVVLLLRLAKTYETTLEKCCAAADPHECYAKVFDEFKPLVEEPQNLIKQNCELFEQLGEYKFQNALLVRYTKKVPQVSTPTLVEVSRNLGKVGSKCCKHPEAKRMPCAEDYLSVVLNQLCVLHEKTPVSDRVTKCCTESLVNRRPCFSALEVDETYVPKEFNAETFTFHADICTLSEKERQIKKQTALVELVKHKPKATKEQLKAVMDDFAAFVEKCCKADDKETCFAEEGKKLVAASQAALGLVTHRLAGLLSRSGGVVKNNFVPTNVGSKAF

SEQ ID NO: 660 - protein, 635 aa, Homo sapiens
MKWVSFISLLFLFSSAYSRSLDKRLAGLLSRSGGVVKNNFVPTNVGSKAFDAHKSEVAHRFKDLGEENFKALVLIAFAQYLQQCPFEDHVKLVNEVTEFAKTCVADESAENCDKSLHTLFGDKLCTVATLRETYGEMADCCAKQEPERNECFLQHKDDNPNLPRLVRPEVDVMCTAFHDNEETFLKKYLYEIARRHPYFYAPELLFFAKRYKAAFTECCQAADKAACLLPKLDELRDEGKASSAKQRLKCASLQKFGERAFKAWAVARLSQRFPKAEFAEVSKLVTDLTKVHTECCHGDLLECADDRADLAKYICENQDSISSKLKECCEKPLLEKSHCIAEVENDEMPADLPSLAADFVESKDVCKNYAEAKDVFLGMFLYEYARRHPDYSVVLLLRLAKTYETTLEKCCAAADPHECYAKVFDEFKPLVEEPQNLIKQNCELFEQLGEYKFQNALLVRYTKKVPQVSTPTLVEVSRNLGKVGSKCCKHPEAKRMPCAEDYLSVVLNQLCVLHEKTPVSDRVTKCCTESLVNRRPCFSALEVDETYVPKEFNAETFTFHADICTLSEKERQIKKQTALVELVKHKPKATKEQLKAVMDDFAAFVEKCCKADDKETCFAEEGKKLVAASQAALGL

SEQ ID NO: 661 - protein, 635 aa, Homo sapiens
MKWVSFISLLFLFSSAYSRSLDKRDAHKSEVAHRFKDLGEENFKALVLIAFAQYLQQCPFEDHVKLVNEVTEFAKTCVADESAENCDKSLHTLFGDKLCTVATLRETYGEMADCCAKQEPERNECFLQHKDDNPNLPRLVRPEVDVMCTAFHDNEETFLKKYLYEIARRHPYFYAPELLFFAKRYKAAFTECCQAADKAACLLPKLDELRDEGKASSAKQRLKCASLQKFGERAFKAWAVARLSQRFPKAEFAEVSKLVTDLTKVHTECCHGDLLECADDRADLAKYICENQDSISSKLKECCEKPLLEKSHCIAEVENDEMPADLPSLAADFVESKDVCKNYAEAKDVFLGMFLYEYARRHPDYSVVLLLRLAKTYETTLEKCCAAADPHECYAKVFDEFKPLVEEPQNLIKQNCELFEQLGEYKFQNALLVRYTKKVPQVSTPTLVEVSRNLGKVGSKCCKHPEAKRMPCAEDYLSVVLNQLCVLHEKTPVSDRVTKCCTESLVNRRPCFSALEVDETYVPKEFNAETFTFHADICTLSEKERQIKKQTALVELVKHKPKATKEQLKAVMDDFAAFVEKCCKADDKETCFAEEGKKLVAASQAALGLLAGLLSRSGGVVKNNFVPTNVGSKAF

SEQ ID NO: 662 - protein, 714 aa, Homo sapiens [sequence omitted]

SEQ ID NO: 663 - protein, 714 aa, Homo sapiens
MKWVSFISLLFLFSSAYSRSLDKRGPETLCGAELVDALQFVCGDRGFYFNKPTGYGSSSRRAPQTGIVDECCFRSCDLRRLEMYCAPLKPAKSARSVRAQRHTDMPKTQKEVHLKNASRGSAGNKNYRMDAHKSEVAHRFKDLGEENFKALVLIAFAQYLQQCPFEDHVKLVNEVTEFAKTCVADESAENCDKSLHTLFGDKLCTVATLRETYGEMADCCAKQEPERNECFLQHKDDNPNLPRLVRPEVDVMCTAFHDNEETFLKKYLYEIARRHPYFYAPELLFFAKRYKAAFTECCQAADKAACLLPKLDELRDEGKASSAKQRLKCASLQKFGERAFKAWAVARLSQRFPKAEFAEVSKLVTDLTKVHTECCHGDLLECADDRADLAKYICENQDSISSKLKECCEKPLLEKSHCIAEVENDEMPADLPSLAADFVESKDVCKNYAEAKDVFLGMFLYEYARRHPDYSVVLLLRLAKTYETTLEKCCAAADPHECYAKVFDEFKPLVEEPQNLIKQNCELFEQLGEYKFQNALLVRYTKKVPQVSTPTLVEVSRNLGKVGSKCCKHPEAKRMPCAEDYLSVVLNQLCVLHEKTPVSDRVTKCCTESLVNRRPCFSALEVDETYVPKEFNAETFTFHADICTLSEKERQIKKQTALVELVKHKPKATKEQLKAVMDDFAAFVEKCCKADDKETCFAEEGKKLVAASQAALGL

SEQ ID NO: 664 - protein, 682 aa, Homo sapiens
MRPTWAWWLFLVLLLALWAPARGHSQGTFTSDYSKYLDSRRAQDFVQWLMNTKRNRNNIAHSQGTFTSDYSKYLDSRRAQDFVQWLMNTKRNRNNIADAHKSEVAHRFKDLGEENFKALVLIAFAQYLQQCPFEDHVKLVNEVTEFAKTCVADESAENCDKSLHTLFGDKLCTVATLRETYGEMADCCAKQEPERNECFLQHKDDNPNLPRLVRPEVDVMCTAFHDNEETFLKKYLYEIARRHPYFYAPELLFFAKRYKAAFTECCQAADKAACLLPKLDELRDEGKASSAKQRLKCASLQKFGERAFKAWAVARLSQRFPKAEFAEVSKLVTDLTKVHTECCHGDLLECADDRADLAKYICENQDSISSKLKECCEKPLLEKSHCIAEVENDEMPADLPSLAADFVESKDVCKNYAEAKDVFLGMFLYEYARRHPDYSVVLLLRLAKTYETTLEKCCAAADPHECYAKVFDEFKPLVEEPQNLIKQNCELFEQLGEYKFQNALLVRYTKKVPQVSTPTLVEVSRNLGKVGSKCCKHPEAKRMPCAEDYLSVVLNQLCVLHEKTPVSDRVTKCCTESLVNRRPCFSALEVDETYVPKEFNAETFTFHADICTLSEKERQIKKQTALVELVKHKPKATKEQLKAVMDDFAAFVEKCCKADDKETCFAEEGKKLVAASQAALGL

SEQ ID NO: 665 - protein, 1056 aa, Artificial sequence [sequence omitted]

SEQ ID NO: 666 - protein, 1055 aa, Artificial sequence
  A consensus signal sequence followed by an N-terminally truncated form of neuraminidase from Influenza A/Hong Kong/213/03 (HK213;H5N1)(amino acids 35-469) fused via a Gly-Ser linker (GGGGSGGGGSGG) to the N-terminus of mature HSA.
MRPTWAWWLFLVLLLALWAPARGSHSIQTGNQHQAEPCNQSIITYENNTWVNQTYVNISNTNFLTEKAVASVTLAGNSSLCPISGWAVYSKDNGIRIGSKGDVFVIREPFISCSHLECRTFFLTQGALLNDKHSNGTVKDRSPHRTLMSCPVGEAPSPYNSRFESVAWSASACHDGTSWLTIGISGPDNGAVAVLKYNGIITDTIKSWRNNIMRTQESECACVNGSCFTVMTDGPSNGQASYKIFRIEKGKVVKSAELNAPNYHYEECSCYPDAGEITCVCRDNWHGSNRPWVSFNQNLEYRIGYICSGVFGDNPRPNDGTGSCGPVSPKGAYGIKGFSFKYGNGVWIGRTKSTNSRSGFEMIWDPNGWTGTDSNFSVKQDIVAITDWSGYSGSFVQHPELTGLDCIRPCFWVELIRGRPKESTIWTSGSSISFCGVNSDTVGWSWPDGAELPFTIDKGGGGSGGGGSGGDAHKSEVAHRFKDLGEENFKALVLIAFAQYLQQCPFEDHVKLVNEVTEFAKTCVADESAENCDKSLHTLFGDKLCTVATLRETYGEMADCCAKQEPERNECFLQHKDDNPNLPRLVRPEVDVMCTAFHDNEETFLKKYLYEIARRHPYFYAPELLFFAKRYKAAFTECCQAADKAACLLPKLDELRDEGKASSAKQRLKCASLQKFGERAFKAWAVARLSQRFPKAEFAEVSKLVTDLTKVHTECCHGDLLECADDRADLAKYICENQDSISSKLKECCEKPLLEKSHCIAEVENDEMPADLPSLAADFVESKDVCKNYAEAKDVFLGMFLYEYARRHPDYSVVLLLRLAKTYETTLEKCCAAADPHECYAKVFDEFKPLVEEPQNLIKQNCELFEQLGEYKFQNALLVRYTKKVPQVSTPTLVEVSRNLGKVGSKCCKHPEAKRMPCAEDYLSVVLNQLCVLHEKTPVSDRVTKCCTESLVNRRPCFSALEVDETYVPKEFNAETFTFHADICTLSEKERQIKKQTALVELVKHKPKATKEQLKAVMDDFAAFVEKCCKADDKETCFAEEGKKLVAASQAALGL

SEQ ID NO: 667 - protein, 1136 aa, Artificial sequence [sequence omitted]

SEQ ID NO: 668 - protein, 1135 aa, Artificial sequence
  A consensus signal sequence followed by a truncated form of hemagglutinin from Influenza A/Hong Kong/213/03 (HK213;H5N1) (amino acids 17-531) lacking a signal peptide and the C-terminal hydrophobic domain, fused via a Gly-Ser linker (GGGGSGGGGSGG) to the N-terminus of mature HSA.
MRPTWAWWLFLVLLLALWAPARGDQICIGYHANNSTEQVDTIMEKNVTVTHAQDILEKTHNGKLCDLDGVKPLILRDCSVAGWLLGNPMCDEFINVPEWSYIVEKANPANDLCYPGDFNDYEELKHLLSRINHFEKIQIIPKNSWSSHEASLGVSSACPYQGKSSFFRNVVWLIKKNNAYPTIKRSYNNTNQEDLLVLWGIHHPNDAAEQTRLYQNPTTYISVGTSTLNQRLVPKIATRSKVNGQNGRMEFFWTILKPNDAINFESNGNFIAPEYAYKIVKKGDSAIMKSELEYGNCNTKCQTPMGAINSSMPFHNIHPLTIGECPKYVKSNRLVLATGLRNSPQRERRRKKRGLFGAIAGFIEGGWQGMVDGWYGYHHSNEQGSGYAADKESTQKAIDGVTNKVNSIIDKMNTQFEAVGREFNNLERRIENLNKKMEDGFLDVWTYNAELLVLMENERTLDFHDSNVKNLYDKVRLQLRDNAKELGNGCFEFYHKCDNECMESVRNGTYDYPQYSEEARLKREEISGVKLESIGTYQGGGGSGGGGSGGDAHKSEVAHRFKDLGEENFKALVLIAFAQYLQQCPFEDHVKLVNEVTEFAKTCVADESAENCDKSLHTLFGDKLCTVATLRETYGEMADCCAKQEPERNECFLQHKDDNPNLPRLVRPEVDVMCTAFHDNEETFLKKYLYEIARRHPYFYAPELLFFAKRYKAAFTECCQAADKAACLLPKLDELRDEGKASSAKQRLKCASLQKFGERAFKAWAVARLSQRFPKAEFAEVSKLVTDLTKVHTECCHGDLLECADDRADLAKYICENQDSISSKLKECCEKPLLEKSHCIAEVENDEMPADLPSLAADFVESKDVCKNYAEAKDVFLGMFLYEYARRHPDYSVVLLLRLAKTYETTLEKCCAAADPHECYAKVFDEFKPLVEEPQNLIKQNCELFEQLGEYKFQNALLVRYTKKVPQVSTPTLVEVSRNLGKVGSKCCKHPEAKRMPCAEDYLSVVLNQLCVLHEKTPVSDRVTKCCTESLVNRRPCFSALEVDETYVPKEFNAETFTFHADICTLSEKERQIKKQTALVELVKHKPKATKEQLKAVMDDFAAFVEKCCKADDKETCFAEEGKKLVAASQAALGL

SEQ ID NO: 669 - protein, 1138 aa, Homo sapiens
MKWVSFISLLFLFSSAYSRSLDKREDDIIIATKNGKVRGMQLTVFGGTVTAFLGIPYAQPPLGRLRFKKPQSLTKWSDIWNATKYANSCCQNIDQSFPGFHGSEMWNPNTDLSEDCLYLNVWIPAPKPKNATVLIWIYGGGFQTGTSSLHVYDGKFLARVERVIVVSMNYRVGALGFLALPGNPEAPGNMGLFDQQLALQWVQKNIAAFGGNPKSVTLFGESAGAASVSLHLLSPGSHSLFTRAILQSGSFNAPWAVTSLYEARNRTLNLAKLTGCSRENETEIIKCLRNKDPQEILLNEAFVVPYGTPLSVNFGPTVDGDFLTDMPDILLELGQFKKTQILVGVNKDEGTWFLVAGAPGFSKDNNSIITRKEFQEGLKIFFPGVSEFGKESILFHYTDWVDDQRPENYREALGDVVGDYNFICPALEFTKKFSEWGNNAFFYYFEHRSSKLPWPEWMGVMHGYEIEFVFGLPLERRDQYTKAEEILSRSIVKRWANFAKYGNPQETQNQSTSWPVFKSTEQKYLTLNTESTRIMTKLRAQQCRFWTSFFPKVDAHKSEVAHRFKDLGEENFKALVLIAFAQYLQQCPFEDHVKLVNEVTEFAKTCVADESAENCDKSLHTLFGDKLCTVATLRETYGEMADCCAKQEPERNECFLQHKDDNPNLPRLVRPEVDVMCTAFHDNEETFLKKYLYEIARRHPYFYAPELLFFAKRYKAAFTECCQAADKAACLLPKLDELRDEGKASSAKQRLKCASLQKFGERAFKAWAVARLSQRFPKAEFAEVSKLVTDLTKVHTECCHGDLLECADDRADLAKYICENQDSISSKLKECCEKPLLEKSHCIAEVENDEMPADLPSLAADFVESKDVCKNYAEAKDVFLGMFLYEYARRHPDYSVVLLLRLAKTYETTLEKCCAAADPHECYAKVFDEFKPLVEEPQNLIKQNCELFEQLGEYKFQNALLVRYTKKVPQVSTPTLVEVSRNLGKVGSKCCKHPEAKRMPCAEDYLSVVLNQLCVLHEKTPVSDRVTKCCTESLVNRRPCFSALEVDETYVPKEFNAETFTFHADICTLSEKERQIKKQTALVELVKHKPKATKEQLKAVMDDFAAFVEKCCKADDKETCFAEEGKKLVAASQAALGL

SEQ ID NO: 670 - protein, 1137 aa, Homo sapiens
MRPTWAWWLFLVLLLALWAPARGEDDIIIATKNGKVRGMQLTVFGGTVTAFLGIPYAQPPLGRLRFKKPQSLTKWSDIWNATKYANSCCQNIDQSFPGFHGSEMWNPNTDLSEDCLYLNVWIPAPKPKNATVLIWIYGGGFQTGTSSLHVYDGKFLARVERVIVVSMNYRVGALGFLALPGNPEAPGNMGLFDQQLALQWVQKNIAAFGGNPKSVTLFGESAGAASVSLHLLSPGSHSLFTRAILQSGSFNAPWAVTSLYEARNRTLNLAKLTGCSRENETEIIKCLRNKDPQEILLNEAFVVPYGTPLSVNFGPTVDGDFLTDMPDILLELGQFKKTQILVGVNKDEGTWFLVAGAPGFSKDNNSIITRKEFQEGLKIFFPGVSEFGKESILFHYTDWVDDQRPENYREALGDVVGDYNFICPALEFTKKFSEWGNNAFFYYFEHRSSKLPWPEWMGVMHGYEIEFVFGLPLERRDQYTKAEEILSRSIVKRWANFAKYGNPQETQNQSTSWPVFKSTEQKYLTLNTESTRIMTKLRAQQCRFWTSFFPKVDAHKSEVAHRFKDLGEENFKALVLIAFAQYLQQCPFEDHVKLVNEVTEFAKTCVADESAENCDKSLHTLFGDKLCTVATLRETYGEMADCCAKQEPERNECFLQHKDDNPNLPRLVRPEVDVMCTAFHDNEETFLKKYLYEIARRHPYFYAPELLFFAKRYKAAFTECCQAADKAACLLPKLDELRDEGKASSAKQRLKCASLQKFGERAFKAWAVARLSQRFPKAEFAEVSKLVTDLTKVHTECCHGDLLECADDRADLAKYICENQDSISSKLKECCEKPLLEKSHCIAEVENDEMPADLPSLAADFVESKDVCKNYAEAKDVFLGMFLYEYARRHPDYSVVLLLRLAKTYETTLEKCCAAADPHECYAKVFDEFKPLVEEPQNLIKQNCELFEQLGEYKFQNALLVRYTKKVPQVSTPTLVEVSRNLGKVGSKCCKHPEAKRMPCAEDYLSVVLNQLCVLHEKTPVSDRVTKCCTESLVNRRPCFSALEVDETYVPKEFNAETFTFHADICTLSEKERQIKKQTALVELVKHKPKATKEQLKAVMDDFAAFVEKCCKADDKETCFAEEGKKLVAASQAALGL

SEQ ID NO: 671 - protein, 662 aa, Homo sapiens
MKWVTFISLLFLFSSAYSRGVFRRDAHKSEVAHRFKDLGEENFKALVLIAFAQYLQQCPFEDHVKLVNEVTEFAKTCVADESAENCDKSLHTLFGDKLCTVATLRETYGEMADCCAKQEPERNECFLQHKDDNPNLPRLVRPEVDVMCTAFHDNEETFLKKYLYEIARRHPYFYAPELLFFAKRYKAAFTECCQAADKAACLLPKLDELRDEGKASSAKQRLKCASLQKFGERAFKAWAVARLSQRFPKAEFAEVSKLVTDLTKVHTECCHGDLLECADDRADLAKYICENQDSISSKLKECCEKPLLEKSHCIAEVENDEMPADLPSLAADFVESKDVCKNYAEAKDVFLGMFLYEYARRHPDYSVVLLLRLAKTYETTLEKCCAAADPHECYAKVFDEFKPLVEEPQNLIKQNCELFEQLGEYKFQNALLVRYTKKVPQVSTPTLVEVSRNLGKVGSKCCKHPEAKRMPCAEDYLSVVLNQLCVLHEKTPVSDRVTKCCTESLVNRRPCFSALEVDETYVPKEFNAETFTFHADICTLSEKERQIKKQTALVELVKHKPKATKEQLKAVMDDFAAFVEKCCKADDKETCFAEEGKKLVAASQAALGLYRQSMNNFQGLRSFGCRFGTCTVQKLAHQIYQFTDKDKDNVAPRSKISPQGYG

SEQ ID NO: 672 - protein, 662 aa, Homo sapiens
MKWVSFISLLFLFSSAYSRSLDKRDAHKSEVAHRFKDLGEENFKALVLIAFAQYLQQCPFEDHVKLVNEVTEFAKTCVADESAENCDKSLHTLFGDKLCTVATLRETYGEMADCCAKQEPERNECFLQHKDDNPNLPRLVRPEVDVMCTAFHDNEETFLKKYLYEIARRHPYFYAPELLFFAKRYKAAFTECCQAADKAACLLPKLDELRDEGKASSAKQRLKCASLQKFGERAFKAWAVARLSQRFPKAEFAEVSKLVTDLTKVHTECCHGDLLECADDRADLAKYICENQDSISSKLKECCEKPLLEKSHCIAEVENDEMPADLPSLAADFVESKDVCKNYAEAKDVFLGMFLYEYARRHPDYSVVLLLRLAKTYETTLEKCCAAADPHECYAKVFDEFKPLVEEPQNLIKQNCELFEQLGEYKFQNALLVRYTKKVPQVSTPTLVEVSRNLGKVGSKCCKHPEAKRMPCAEDYLSVVLNQLCVLHEKTPVSDRVTKCCTESLVNRRPCFSALEVDETYVPKEFNAETFTFHADICTLSEKERQIKKQTALVELVKHKPKATKEQLKAVMDDFAAFVEKCCKADDKETCFAEEGKKLVAASQAALGLYRQSMNNFQGLRSFGCRFGTCTVQKLAHQIYQFTDKDKDNVAPRSKISPQGYG

SEQ ID NO: 673 - protein, 678 aa, Homo sapiens
MKWVTFISLLFLFSSAYSRGVFRRDAHKSEVAHRFKDLGEENFKALVLIAFAQYLQQCPFEDHVKLVNEVTEFAKTCVADESAENCDKSLHTLFGDKLCTVATLRETYGEMADCCAKQEPERNECFLQHKDDNPNLPRLVRPEVDVMCTAFHDNEETFLKKYLYEIARRHPYFYAPELLFFAKRYKAAFTECCQAADKAACLLPKLDELRDEGKASSAKQRLKCASLQKFGERAFKAWAVARLSQRFPKAEFAEVSKLVTDLTKVHTECCHGDLLECADDRADLAKYICENQDSISSKLKECCEKPLLEKSHCIAEVENDEMPADLPSLAADFVESKDVCKNYAEAKDVFLGMFLYEYARRHPDYSVVLLLRLAKTYETTLEKCCAAADPHECYAKVFDEFKPLVEEPQNLIKQNCELFEQLGEYKFQNALLVRYTKKVPQVSTPTLVEVSRNLGKVGSKCCKHPEAKRMPCAEDYLSVVLNQLCVLHEKTPVSDRVTKCCTESLVNRRPCFSALEVDETYVPKEFNAETFTFHADICTLSEKERQIKKQTALVELVKHKPKATKEQLKAVMDDFAAFVEKCCKADDKETCFAEEGKKLVAASQAALGLIKPEAPGEDASPEELNRYYASLRHYLNLVTRQRYIKPEAPGEDASPEELNRYYASLRHYLNLVTRQRYG

SEQ ID NO: 674 - protein, 678 aa, Homo sapiens
MKWVSFISLLFLFSSAYSRSLDKRDAHKSEVAHRFKDLGEENFKALVLIAFAQYLQQCPFEDHVKLVNEVTEFAKTCVADESAENCDKSLHTLFGDKLCTVATLRETYGEMADCCAKQEPERNECFLQHKDDNPNLPRLVRPEVDVMCTAFHDNEETFLKKYLYEIARRHPYFYAPELLFFAKRYKAAFTECCQAADKAACLLPKLDELRDEGKASSAKQRLKCASLQKFGERAFKAWAVARLSQRFPKAEFAEVSKLVTDLTKVHTECCHGDLLECADDRADLAKYICENQDSISSKLKECCEKPLLEKSHCIAEVENDEMPADLPSLAADFVESKDVCKNYAEAKDVFLGMFLYEYARRHPDYSVVLLLRLAKTYETTLEKCCAAADPHECYAKVFDEFKPLVEEPQNLIKQNCELFEQLGEYKFQNALLVRYTKKVPQVSTPTLVEVSRNLGKVGSKCCKHPEAKRMPCAEDYLSVVLNQLCVLHEKTPVSDRVTKCCTESLVNRRPCFSALEVDETYVPKEFNAETFTFHADICTLSEKERQIKKQTALVELVKHKPKATKEQLKAVMDDFAAFVEKCCKADDKETCFAEEGKKLVAASQAALGLIKPEAPGEDASPEELNRYYASLRHYLNLVTRQRYIKPEAPGEDASPEELNRYYASLRHYLNLVTRQRYG

SEQ ID NO: 675 - protein, 774 aa, Homo sapiens
MKWVSFISLLFLFSSAYSRSLDKRDAHKSEVAHRFKDLGEENFKALVLIAFAQYLQQSPFEDHVKLVNEVTEFAKTCVADESAENCDKSLHTLFGDKLCTVATLRETYGEMADCCAKQEPERNECFLQHKDDNPNLPRLVRPEVDVMCTAFHDNEETFLKKYLYEIARRHPYFYAPELLFFAKRYKAAFTECCQAADKAACLLPKLDELRDEGKASSAKQRLKCASLQKFGERAFKAWAVARLSQRFPKAEFAEVSKLVTDLTKVHTECCHGDLLECADDRADLAKYICENQDSISSKLKECCEKPLLEKSHCIAEVENDEMPADLPSLAADFVESKDVCKNYAEAKDVFLGMFLYEYARRHPDYSVVLLLRLAKTYETTLEKCCAAADPHECYAKVFDEFKPLVEEPQNLIKQNCELFEQLGEYKFQNALLVRYTKKVPQVSTPTLVEVSRNLGKVGSKCCKHPEAKRMPCAEDYLSVVLNQLCVLHEKTPVSDRVTKCCTESLVNRRPCFSALEVDETYVPKEFNAETFTFHADICTLSEKERQIKKQTALVELVKHKPKATKEQLKAVMDDFAAFVEKCCKADDKETCFAEEGKKLVAASQAALGLCDLPQTHSLGSRRTLMLLAQMRRISLFSCLKDRHDFGFPQEEFGNQFQKAETIPVLHEMIQQIFNLFSTKDSSAAWDETLLDKFYTELYQQLNDLEACVIQGVGVTETPLMKEDSILAVRKYFQRITLYLKEKKYSPCAWEVVRAEIMRSFSLSTNLQESLRSKE

SEQ ID NO: 676 - protein, 774 aa, Homo sapiens
MKWVSFISLLFLFSSAYSRSLDKRDAHKSEVAHRFKDLGEENFKALVLIAFAQYLQQCPFEDHVKLVNEVTEFAKTCVADESAENCDKSLHTLFGDKLCTVATLRETYGEMADCCAKQEPERNECFLQHKDDNPNLPRLVRPEVDVMCTAFHDNEETFLKKYLYEIARRHPYFYAPELLFFAKRYKAAFTECCQAADKAACLLPKLDELRDEGKASSAKQRLKCASLQKFGERAFKAWAVARLSQRFPKAEFAEVSKLVTDLTKVHTECCHGDLLECADDRADLAKYICENQDSISSKLKECCEKPLLEKSHCIAEVENDEMPADLPSLAADFVESKDVCKNYAEAKDVFLGMFLYEYARRHPDYSVVLLLRLAKTYETTLEKCCAAADPHECYAKVFDEFKPLVEEPQNLIKQNCELFEQLGEYKFQNALLVRYTKKVPQVSTPTLVEVSRNLGKVGSKCCKHPEAKRMPCAEDYLSVVLNQLCVLHEKTPVSDRVTKCCTESLVNRRPCFSALEVDETYVPKEFNAETFTFHADICTLSEKERQIKKQTALVELVKHKPKATKEQLKAVMDDFAAFVEKCCKADDKETCFAEEGKKLVAASQAALGLSDLPQTHSLGSRRTLMLLAQMRRISLFSCLKDRHDFGFPQEEFGNQFQKAETIPVLHEMIQQIFNLFSTKDSSAAWDETLLDKFYTELYQQLNDLEACVIQGVGVTETPLMKEDSILAVRKYFQRITLYLKEKKYSPCAWEVVRAEIMRSFSLSTNLQESLRSKE

SEQ ID NO: 677 - protein, 774 aa, Homo sapiens
MKWVSFISLLFLFSSAYSRSLDKRDAHKSEVAHRFKDLGEENFKALVLIAFAQYLQQCPFEDHVKLVNEVTEFAKTCVADESAENCDKSLHTLFGDKLCTVATLRETYGEMADCCAKQEPERNECFLQHKDDNPNLPRLVRPEVDVMCTAFHDNEETFLKKYLYEIARRHPYFYAPELLFFAKRYKAAFTECCQAADKAACLLPKLDELRDEGKASSAKQRLKCASLQKFGERAFKAWAVARLSQRFPKAEFAEVSKLVTDLTKVHTECCHGDLLECADDRADLAKYICENQDSISSKLKECCEKPLLEKSHCIAEVENDEMPADLPSLAADFVESKDVCKNYAEAKDVFLGMFLYEYARRHPDYSVVLLLRLAKTYETTLEKCCAAADPHECYAKVFDEFKPLVEEPQNLIKQNCELFEQLGEYKFQNALLVRYTKKVPQVSTPTLVEVSRNLGKVGSKCCKHPEAKRMPCAEDYLSVVLNQLCVLHEKTPVSDRVTKCCTESLVNRRPCFSALEVDETYVPKEFNAETFTFHADICTLSEKERQIKKQTALVELVKHKPKATKEQLKAVMDDFAAFVEKCCKADDKETCFAEEGKKLVAASQAALGLCDLPQTHSLGSRRTLMLLAQMRRISLFSSLKDRHDFGFPQEEFGNQFQKAETIPVLHEMIQQIFNLFSTKDSSAAWDETLLDKFYTELYQQLNDLEACVIQGVGVTETPLMKEDSILAVRKYFQRITLYLKEKKYSPCAWEVVRAEIMRSFSLSTNLQESLRSKE

SEQ ID NO: 678 - protein, 774 aa, Homo sapiens
MKWVSFISLLFLFSSAYSRSLDKRDAHKSEVAHRFKDLGEENFKALVLIAFAQYLQQCPFEDHVKLVNEVTEFAKTCVADESAENCDKSLHTLFGDKLCTVATLRETYGEMADCCAKQEPERNECFLQHKDDNPNLPRLVRPEVDVMCTAFHDNEETFLKKYLYEIARRHPYFYAPELLFFAKRYKAAFTECCQAADKAACLLPKLDELRDEGKASSAKQRLKCASLQKFGERAFKAWAVARLSQRFPKAEFAEVSKLVTDLTKVHTECCHGDLLECADDRADLAKYICENQDSISSKLKECCEKPLLEKSHCIAEVENDEMPADLPSLAADFVESKDVCKNYAEAKDVFLGMFLYEYARRHPDYSVVLLLRLAKTYETTLEKCCAAADPHECYAKVFDEFKPLVEEPQNLIKQNCELFEQLGEYKFQNALLVRYTKKVPQVSTPTLVEVSRNLGKVGSKCCKHPEAKRMPCAEDYLSVVLNQLCVLHEKTPVSDRVTKCCTESLVNRRPCFSALEVDETYVPKEFNAETFTFHADICTLSEKERQIKKQTALVELVKHKPKATKEQLKAVMDDFAAFVEKCCKADDKETCFAEEGKKLVAASQAALGLCDLPQTHSLGSRRTLMLLAQMRRISLFSCLKDRHDFGFPQEEFGNQFQKAETIPVLHEMIQQIFNLFSTKDSSAAWDETLLDKFYTELYQQLNDLEASVIQGVGVTETPLMKEDSILAVRKYFQRITLYLKEKKYSPCAWEVVRAEIMRSFSLSTNLQESLRSKE

SEQ ID NO: 679 - protein, 774 aa, Homo sapiens
MKWVSFISLLFLFSSAYSRSLDKRDAHKSEVAHRFKDLGEENFKALVLIAFAQYLQQCPFEDHVKLVNEVTEFAKTCVADESAENCDKSLHTLFGDKLCTVATLRETYGEMADCCAKQEPERNECFLQHKDDNPNLPRLVRPEVDVMCTAFHDNEETFLKKYLYEIARRHPYFYAPELLFFAKRYKAAFTECCQAADKAACLLPKLDELRDEGKASSAKQRLKCASLQKFGERAFKAWAVARLSQRFPKAEFAEVSKLVTDLTKVHTECCHGDLLECADDRADLAKYICENQDSISSKLKECCEKPLLEKSHCIAEVENDEMPADLPSLAADFVESKDVCKNYAEAKDVFLGMFLYEYARRHPDYSVVLLLRLAKTYETTLEKCCAAADPHECYAKVFDEFKPLVEEPQNLIKQNCELFEQLGEYKFQNALLVRYTKKVPQVSTPTLVEVSRNLGKVGSKCCKHPEAKRMPCAEDYLSVVLNQLCVLHEKTPVSDRVTKCCTESLVNRRPCFSALEVDETYVPKEFNAETFTFHADICTLSEKERQIKKQTALVELVKHKPKATKEQLKAVMDDFAAFVEKCCKADDKETCFAEEGKKLVAASQAALGLCDLPQTHSLGSRRTLMLLAQMRRISLFSCLKDRHDFGFPQEEFGNQFQKAETIPVLHEMIQQIFNLFSTKDSSAAWDETLLDKFYTELYQQLNDLEACVIQGVGVTETPLMKEDSILAVRKYFQRITLYLKEKKYSPSAWEVVRAEIMRSFSLSTNLQESLRSKE

SEQ ID NO: 680 - protein, 397 aa, Homo sapiens
MAPISLSWLLRLATFCHLTVLLAGQHHGVTKCNITCSKMTSKIPVALLIHYQQNQASCGKRAIILETRQHRLFCADPKEQWVKDAMQHLDRQAAALTRNGGTFEKQIGEVKPRTTPAAGGMDESVVLEPEATGESSSLEPTPSSQEAQRALGTSPELPTGVTGSSGTRLPPTPKAQDGGPVGTELFRVPPVSTAATWQSSAPHQPGPSLWAEAKTSEAPSTQDPSTQASTASSPAPEENAPSEGQRVWGQGQSPRPENSLEREEMGPVPAHTDAFQDWGPGSMAHVSVVPVSSEGTPSREPVASGSWTPKAEEPIHATMDPQRLGVLITPVPDAQAATRRQAVGLLAFLGLLFCLGVAMFTYQSLQGCPRKMAGEMAEGLRYIPRSCGSNSYVLVPV

SEQ ID NO: 681 - protein, 397 aa, Homo sapiens; identical to SEQ ID NO: 680

SEQ ID NO: 682 - protein, 397 aa, Homo sapiens; identical to SEQ ID NO: 680

SEQ ID NO: 683 - protein, 397 aa, Homo sapiens; identical to SEQ ID NO: 680

SEQ ID NO: 684 - protein, 37 aa, Homo sapiens
HSQGTFTSDYSKYLDSRRAQDFVQWLMNTKRNRNNIA

SEQ ID NO: 685 - protein, 37 aa, Homo sapiens; identical to SEQ ID NO: 684

SEQ ID NO: 686 - protein, 37 aa, Homo sapiens; identical to SEQ ID NO: 684

SEQ ID NO: 687 - protein, 10 aa, Pichia anomala
AKVTMTCSAS

SEQ ID NO: 688 - protein, 37 aa, Homo sapiens; identical to SEQ ID NO: 684

SEQ ID NO: 689 - protein, 224 aa, Homo sapiens
MPGSPRPAPSWVLLLRLLALLRPPGLGEACSCAPAHPQQHICHSALVIRAKISSEKVVPASADPADTEKMLRYEIKQIKMFKGFEKVKDVQYIYTPFDSSLCGVKLEANSQKQYLLTGQVLSDGKVFIHLCNYIEPWEDLSLVQRESLNHHYHLNCGCQITTCYTVPCTISAPNECLWTDWLLERKLYGYQAQHYVCMKHVDGTCSWYRGHLPLRKEFVDIVQP

SEQ ID NO: 690 - protein, 224 aa, Homo sapiens; identical to SEQ ID NO: 689

SEQ ID NO: 691 - protein, 36 aa, Homo sapiens
YPIKPEAPGEDASPEELNRYYASLRHYLNLVTRQRY

SEQ ID NO: 692 - protein, 36 aa, Homo sapiens; identical to SEQ ID NO: 691

SEQ ID NO: 693 - protein, 52 aa, Homo sapiens
YRQSMNNFQGLRSFGCRFGTCTVQKLAHQIYQFTDKDKDNVAPRSKISPQGY

SEQ ID NO: 694 - protein, 36 aa, Homo sapiens
HSQGTFTSDYSKYLDSRRAQDFVQWLMNTKRNRNNI

SEQ ID NO: 695 - protein, 28 aa, Homo sapiens
GSSFLSPEHQRVQQRKESKKPPAKLQPR

SEQ ID NO: 696 - protein, 28 aa, Homo sapiens
GSSFLSPEHQRVQQRKESKKPPAKLQPR

SEQ ID NO: 697 - protein, 37 aa, Homo sapiens
ACDTATCVTHRLAGLLSRSGGVVKNNFVPTNVGSKAF

SEQ ID NO: 698 - protein, 37 aa, Homo sapiens; identical to SEQ ID NO: 697

SEQ ID NO: 699 - protein, 37 aa, Homo sapiens; identical to SEQ ID NO: 697

SEQ ID NO: 700 - protein, 37 aa, Homo sapiens; identical to SEQ ID NO: 697

SEQ ID NO: 701 - protein, 153 aa, Homo sapiens
MGKISSLPTQLFKCCFCDFLKVKMHTMSSSHLFYLALCLLTFTSSATAGPETLCGAELVDALQFVCGDRGFYFNKPTGYGSSSRRAPQTGIVDECCFRSCDLRRLEMYCAPLKPAKSARSVRAQRHTDMPKTQKEVHLKNASRGSAGNKNYRM

SEQ ID NO: 702 - protein, 153 aa, Homo sapiens; identical to SEQ ID NO: 701

SEQ ID NO: 703 - protein, 36 aa, Homo sapiens; identical to SEQ ID NO: 694

SEQ ID NO: 704 - protein, 469 aa, Influenza A virus
MNPNQKITTIGSICMVIGIVSLMLQIGNIISIWVSHSIQTGNQHQAEPCNQSIITYENNTWVNQTYVNISNTNFLTEKAVASVTLAGNSSLCPISGWAVYSKDNGIRIGSKGDVFVIREPFISCSHLECRTFFLTQGALLNDKHSNGTVKDRSPHRTLMSCPVGEAPSPYNSRFESVAWSASACHDGTSWLTIGISGPDNGAVAVLKYNGIITDTIKSWRNNIMRTQESECACVNGSCFTVMTDGPSNGQASYKIFRIEKGKVVKSAELNAPNYHYEECSCYPDAGEITCVCRDNWHGSNRPWVSFNQNLEYRIGYICSGVFGDNPRPNDGTGSCGPVSPKGAYGIKGFSFKYGNGVWIGRTKSTNSRSGFEMIWDPNGWTGTDSNFSVKQDIVAITDWSGYSGSFVQHPELTGLDCIRPCFWVELIRGRPKESTIWTSGSSISFCGVNSDTVGWSWPDGAELPFTIDK

SEQ ID NO: 705 - protein, 469 aa, Influenza A virus; identical to SEQ ID NO: 704

SEQ ID NO: 706 - protein, 568 aa, Influenza A virus
MEKIVLLFAIVSLVKSDQICIGYHANNSTEQVDTIMEKNVTVTHAQDILEKTHNGKLCDLDGVKPLILRDCSVAGWLLGNPMCDEFINVPEWSYIVEKANPANDLCYPGDFNDYEELKHLLSRINHFEKIQIIPKNSWSSHEASLGVSSACPYQGKSSFFRNVVWLIKKNNAYPTIKRSYNNTNQEDLLVLWGIHHPNDAAEQTRLYQNPTTYISVGTSTLNQRLVPKIATRSKVNGQNGRMEFFWTILKPNDAINFESNGNFIAPEYAYKIVKKGDSAIMKSELEYGNCNTKCQTPMGAINSSMPFHNIHPLTIGECPKYVKSNRLVLATGLRNSPQRERRRKKRGLFGAIAGFIEGGWQGMVDGWYGYHHSNEQGSGYAADKESTQKAIDGVTNKVNSIIDKMNTQFEAVGREFNNLERRIENLNKKMEDGFLDVWTYNAELLVLMENERTLDFHDSNVKNLYDKVRLQLRDNAKELGNGCFEFYHKCDNECMESVRNGTYDYPQYSEEARLKREEISGVKLESIGTYQILSIYSTVASSLALAIMVAGLSLWMCSNGSLQCRICI

SEQ ID NO: 707 - protein, 568 aa, Influenza A virus; identical to SEQ ID NO: 706

SEQ ID NO: 708 - protein, 602 aa, Homo sapiens
MHSKVTIICIRFLFWFLLLCMLIGKSHTEDDIIIATKNGKVRGMNLTVFGGTVTAFLGIPYAQPPLGRLRFKKPQSLTKWSDIWNATKYANSCCQNIDQSFPGFHGSEMWNPNTDLSEDCLYLNVWIPAPKPKNATVLIWIYGGGFQTGTSSLHVYDGKFLARVERVIVVSMNYRVGALGFLALPGNPEAPGNMGLFDQQLALQWVQKNIAAFGGNPKSVTLFGESAGAASVSLHLLSPGSHSLFTRAILQSGSFNAPWAVTSLYEARNRTLNLAKLTGCSRENETEIIKCLRNKDPQEILLNEAFVVPYGTPLSVNFGPTVDGDFLTDMPDILLELGQFKKTQILVGVNKDEGTAFLVYGAPGFSKDNNSIITRKEFQEGLKIFFPGVSEFGKESILFHYTDWVDDQRPENYREALGDVVGDYNFICPALEFTKKFSEWGNNAFFYYFEHRSSKLPWPEWMGVMHGYEIEFVFGLPLERRDNYTKAEEILSRSIVKRWANFAKYGNPNETQNNSTSWPVFKSTEQKYLTLNTESTRIMTKLRAQQCRFWTSFFPKVLEMTGNIDEAEWEWKAGFHRWNNYMMDWKNQFNDYTSKKESCVGL

SEQ ID NO: 709 - protein, 602 aa, Homo sapiens; identical to SEQ ID NO: 708

SEQ ID NO: 710 - protein, 52 aa, Homo sapiens; identical to SEQ ID NO: 693

SEQ ID NO: 711 - protein, 52 aa, Homo sapiens; identical to SEQ ID NO: 693

SEQ ID NO: 712 - protein, 36 aa, Homo sapiens; identical to SEQ ID NO: 691

SEQ ID NO: 713 - protein, 36 aa, Homo sapiens; identical to SEQ ID NO: 691

SEQ ID NO: 714 - protein, 165 aa, Homo sapiens [sequence omitted]

SEQ ID NO: 715 - protein, 165 aa, Homo sapiens [sequence omitted]

SEQ ID NO: 716 - protein, 165 aa, Homo sapiens [sequence omitted]

SEQ ID NO: 717 - protein, 165 aa, Homo sapiens [sequence omitted]

SEQ ID NO: 718 - protein, 165 aa, Homo sapiens [sequence omitted]

SEQ ID NO: 719 - DNA, 46 bp, Homo sapiens
caagctgccttaggcttacactcccaaggtaccttcacctccgact

SEQ ID NO: 720 - DNA, 59 bp, Homo sapiens
gcgcgcgcctaaggttactaggcgatgttatttctgtttctcttggtgttcatcaacca

SEQ ID NO: 721 - DNA, 46 bp, Homo sapiens; identical to SEQ ID NO: 719

SEQ ID NO: 722 - DNA, 59 bp, Homo sapiens; identical to SEQ ID NO: 720

SEQ ID NO: 723 - DNA, 33 bp, Homo sapiens
aggagcgtcgacaaaagatgcagctgcgccccg

SEQ ID NO: 724 - DNA, 51 bp, Homo sapiens
cgcgcatcgatgagcaacctcactcttgtgtgcatcgccacagttcagatg

SEQ ID NO: 725 - DNA, 32 bp, Homo sapiens
aagctgccttaggcttatgcagctgcgccccg

SEQ ID NO: 726 - DNA, 28 bp, Homo sapiens
ttggcgcgcctcagccacagttcagatg

SEQ ID NO: 727 - DNA, 41 bp, Homo sapiens
gcccccgcccgcggcatcaaacccgaggctcccggcgaaga

SEQ ID NO: 728 - DNA, 63 bp, Homo sapiens
caagctgccttaggcttaggctccagcttcctgagccctgaacaccagagagtccagcagaga

SEQ ID NO: 729 - DNA, 41 bp, Homo sapiens
cgcgcgcctaaggtcattatcggggctgcagcttggctggt

SEQ ID NO: 730 - DNA, 63 bp, Homo sapiens; identical to SEQ ID NO: 728

SEQ ID NO: 731 - DNA, 41 bp, Homo sapiens; identical to SEQ ID NO: 729

SEQ ID NO: 732 - DNA, 108 bp, Homo sapiens; identical to SEQ ID NO: 613

SEQ ID NO: 733 - DNA, 102 bp, Homo sapiens
atcaaacccgaggctcccggcgaagacgcctcgccggaggagctgaaccgctactacgcctccctgcgccactacctcaacctggtcacccggcagcggtat

SEQ ID NO: 734 - DNA, 102 bp, Homo sapiens; identical to SEQ ID NO: 733

SEQ ID NO: 735 - DNA, 102 bp, Homo sapiens; identical to SEQ ID NO: 733

SEQ ID NO: 736 - DNA, 102 bp, Homo sapiens; identical to SEQ ID NO: 733

SEQ ID NO: 737 - DNA, 102 bp, Homo sapiens; identical to SEQ ID NO: 733

SEQ ID NO: 738 - DNA, 78 bp, Homo sapiens
gcacaccagatctaccagttcacagataaggacaaggacaacgtcgcccccaggagcaagatcagcccccagggctac

SEQ ID NO: 739 - DNA, 111 bp, Homo sapiens
cattcacagggcacattcaccagtgactacagcaagtatctggactccaggcgtgcccaagattttgtgcagtggttgatgaataccaagaggaacaggaataacattgcc

SEQ ID NO: 740 - DNA, 111 bp, Homo sapiens; identical to SEQ ID NO: 739

SEQ ID NO: 741 - DNA, 84 bp, Homo sapiens; identical to SEQ ID NO: 617

SEQ ID NO: 742 - DNA, 675 bp, Homo sapiens; identical to SEQ ID NO: 611

SEQ ID NO: 743 - DNA, 675 bp, Homo sapiens; identical to SEQ ID NO: 611

SEQ ID NO: 744 - protein, 645 aa, Homo sapiens
MKWVSFISLLFLFSSAYSRSLDKRDAHKSEVAHRFKDLGEENFKALVLIAFAQYLQQCPFEDHVKLVNEVTEFAKTCVADESAENCDKSLHTLFGDKLCTVATLRETYGEMADCCAKQEPERNECFLQHKDDNPNLPRLVRPEVDVMCTAFHDNEETFLKKYLYEIARRHPYFYAPELLFFAKRYKAAFTECCQAADKAACLLPKLDELRDEGKASSAKQRLKCASLQKFGERAFKAWAVARLSQRFPKAEFAEVSKLVTDLTKVHTECCHGDLLECADDRADLAKYICENQDSISSKLKECCEKPLLEKSHCIAEVENDEMPADLPSLAADFVESKDVCKNYAEAKDVFLGMFLYEYARRHPDYSVVLLLRLAKTYETTLEKCCAAADPHECYAKVFDEFKPLVEEPQNLIKQNCELFEQLGEYKFQNALLVRYTKKVPQVSTPTLVEVSRNLGKVGSKCCKHPEAKRMPCAEDYLSVVLNQLCVLHEKTPVSDRVTKCCTESLVNRRPCFSALEVDETYVPKEFNAETFTFHADICTLSEKERQIKKQTALVELVKHKPKATKEQLKAVMDDFAAFVEKCCKADDKETCFAEEGKKLVAASQAALGLYPIKPEAPGEDASPEELNRYYASLRHYLNLVTRQRY

SEQ ID NO: 745 - protein, 643 aa, Homo sapiens
MKWVSFISLLFLFSSAYSRSLDKRDAHKSEVAHRFKDLGEENFKALVLIAFAQYLQQCPFEDHVKLVNEVTEFAKTCVADESAENCDKSLHTLFGDKLCTVATLRETYGEMADCCAKQEPERNECFLQHKDDNPNLPRLVRPEVDVMCTAFHDNEETFLKKYLYEIARRHPYFYAPELLFFAKRYKAAFTECCQAADKAACLLPKLDELRDEGKASSAKQRLKCASLQKFGERAFKAWAVARLSQRFPKAEFAEVSKLVTDLTKVHTECCHGDLLECADDRADLAKYICENQDSISSKLKECCEKPLLEKSHCIAEVENDEMPADLPSLAADFVESKDVCKNYAEAKDVFLGMFLYEYARRHPDYSVVLLLRLAKTYETTLEKCCAAADPHECYAKVFDEFKPLVEEPQNLIKQNCELFEQLGEYKFQNALLVRYTKKVPQVSTPTLVEVSRNLGKVGSKCCKHPEAKRMPCAEDYLSVVLNQLCVLHEKTPVSDRVTKCCTESLVNRRPCFSALEVDETYVPKEFNAETFTFHADICTLSEKERQIKKQTALVELVKHKPKATKEQLKAVMDDFAAFVEKCCKADDKETCFAEEGKKLVAASQAALGLIKPEAPGEDASPEELNRYYASLRHYLNLVTRQRY

SEQ ID NO: 746 - protein, 643 aa, Homo sapiens
MKWVTFISLLFLFSSAYSRGVFRRIKPEAPGEDASPEELNRYYASLRHYLNLVTRQRYDAHKSEVAHRFKDLGEENFKALVLIAFAQYLQQCPFEDHVKLVNEVTEFAKTCVADESAENCDKSLHTLFGDKLCTVATLRETYGEMADCCAKQEPERNECFLQHKDDNPNLPRLVRPEVDVMCTAFHDNEETFLKKYLYEIARRHPYFYAPELLFFAKRYKAAFTECCQAADKAACLLPKLDELRDEGKASSAKQRLKCASLQKFGERAFKAWAVARLSQRFPKAEFAEVSKLVTDLTKVHTECCHGDLLECADDRADLAKYICENQDSISSKLKECCEKPLLEKSHCIAEVENDEMPADLPSLAADFVESKDVCKNYAEAKDVFLGMFLYEYARRHPDYSVVLLLRLAKTYETTLEKCCAAADPHECYAKVFDEFKPLVEEPQNLIKQNCELFEQLGEYKFQNALLVRYTKKVPQVSTPTLVEVSRNLGKVGSKCCKHPEAKRMPCAEDYLSVVLNQLCVLHEKTPVSDRVTKCCTESLVNRRPCFSALEVDETYVPKEFNAETFTFHADICTLSEKERQIKKQTALVELVKHKPKATKEQLKAVMDDFAAFVEKCCKADDKETCFAEEGKKLVAASQAALGL

SEQ ID NO: 747 - protein, 643 aa, Homo sapiens
MKWVSFISLLFLFSSAYSRSLDKRIKPEAPGEDASPEELNRYYASLRHYLNLVTRQRYDAHKSEVAHRFKDLGEENFKALVLIAFAQYLQQCPFEDHVKLVNEVTEFAKTCVADESAENCDKSLHTLFGDKLCTVATLRETYGEMADCCAKQEPERNECFLQHKDDNPNLPRLVRPEVDVMCTAFHDNEETFLKKYLYEIARRHPYFYAPELLFFAKRYKAAFTECCQAADKAACLLPKLDELRDEGKASSAKQRLKCASLQKFGERAFKAWAVARLSQRFPKAEFAEVSKLVTDLTKVHTECCHGDLLECADDRADLAKYICENQDSISSKLKECCEKPLLEKSHCIAEVENDEMPADLPSLAADFVESKDVCKNYAEAKDVFLGMFLYEYARRHPDYSVVLLLRLAKTYETTLEKCCAAADPHECYAKVFDEFKPLVEEPQNLIKQNCELFEQLGEYKFQNALLVRYTKKVPQVSTPTLVEVSRNLGKVGSKCCKHPEAKRMPCAEDYLSVVLNQLCVLHEKTPVSDRVTKCCTESLVNRRPCFSALEVDETYVPKEFNAETFTFHADICTLSEKERQIKKQTALVELVKHKPKATKEQLKAVMDDFAAFVEKCCKADDKETCFAEEGKKLVAASQAALGL

SEQ ID NO: 748 - protein, 677 aa, Homo sapiens
MKWVSFISLLFLFSSAYSRSLDKRIKPEAPGEDASPEELNRYYASLRHYLNLVTRQRYIKPEAPGEDASPEELNRYYASLRHYLNLVTRQRYDAHKSEVAHRFKDLGEENFKALVLIAFAQYLQQCPFEDHVKLVNEVTEFAKTCVADESAENCDKSLHTLFGDKLCTVATLRETYGEMADCCAKQEPERNECFLQHKDDNPNLPRLVRPEVDVMCTAFHDNEETFLKKYLYEIARRHPYFYAPELLFFAKRYKAAFTECCQAADKAACLLPKLDELRDEGKASSAKQRLKCASLQKFGERAFKAWAVARLSQRFPKAEFAEVSKLVTDLTKVHTECCHGDLLECADDRADLAKYICENQDSISSKLKECCEKPLLEKSHCIAEVENDEMPADLPSLAADFVESKDVCKNYAEAKDVFLGMFLYEYARRHPDYSVVLLLRLAKTYETTLEKCCAAADPHECYAKVFDEFKPLVEEPQNLIKQNCELFEQLGEYKFQNALLVRYTKKVPQVSTPTLVEVSRNLGKVGSKCCKHPEAKRMPCAEDYLSVVLNQLCVLHEKTPVSDRVTKCCTESLVNRRPCFSALEVDETYVPKEFNAETFTFHADICTLSEKERQIKKQTALVELVKHKPKATKEQLKAVMDDFAAFVEKCCKADDKETCFAEEGKKLVAASQAALGL

SEQ ID NO: 749 - protein, 677 aa, Homo sapiens
MKWVSFISLLFLFSSAYSRSLDKRDAHKSEVAHRFKDLGEENFKALVLIAFAQYLQQCPFEDHVKLVNEVTEFAKTCVADESAENCDKSLHTLFGDKLCTVATLRETYGEMADCCAKQEPERNECFLQHKDDNPNLPRLVRPEVDVMCTAFHDNEETFLKKYLYEIARRHPYFYAPELLFFAKRYKAAFTECCQAADKAACLLPKLDELRDEGKASSAKQRLKCASLQKFGERAFKAWAVARLSQRFPKAEFAEVSKLVTDLTKVHTECCHGDLLECADDRADLAKYICENQDSISSKLKECCEKPLLEKSHCIAEVENDEMPADLPSLAADFVESKDVCKNYAEAKDVFLGMFLYEYARRHPDYSVVLLLRLAKTYETTLEKCCAAADPHECYAKVFDEFKPLVEEPQNLIKQNCELFEQLGEYKFQNALLVRYTKKVPQVSTPTLVEVSRNLGKVGSKCCKHPEAKRMPCAEDYLSVVLNQLCVLHEKTPVSDRVTKCCTESLVNRRPCFSALEVDETYVPKEFNAETFTFHADICTLSEKERQIKKQTALVELVKHKPKATKEQLKAVMDDFAAFVEKCCKADDKETCFAEEGKKLVAASQAALGLIKPEAPGEDASPEELNRYYASLRHYLNLVTRQRYIKPEAPGEDASPEELNRYYASLRHYLNLVTRQRY

SEQ ID NO: 750 - protein, 635 aa, Homo sapiens
MKWVSFISLLFLFSSAYSRSLDKRAHQIYQFTDKDKDNVAPRSKISPQGYDAHKSEVAHRFKDLGEENFKALVLIAFAQYLQQCPFEDHVKLVNEVTEFAKTCVADESAENCDKSLHTLFGDKLCTVATLRETYGEMADCCAKQEPERNECFLQHKDDNPNLPRLVRPEVDVMCTAFHDNEETFLKKYLYEIARRHPYFYAPELLFFAKRYKAAFTECCQAADKAACLLPKLDELRDEGKASSAKQRLKCASLQKFGERAFKAWAVARLSQRFPKAEFAEVSKLVTDLTKVHTECCHGDLLECADDRADLAKYICENQDSISSKLKECCEKPLLEKSHCIAEVENDEMPADLPSLAADFVESKDVCKNYAEAKDVFLGMFLYEYARRHPDYSVVLLLRLAKTYETTLEKCCAAADPHECYAKVFDEFKPLVEEPQNLIKQNCELFEQLGEYKFQNALLVRYTKKVPQVSTPTLVEVSRNLGKVGSKCCKHPEAKRMPCAEDYLSVVLNQLCVLHEKTPVSDRVTKCCTESLVNRRPCFSALEVDETYVPKEFNAETFTFHADICTLSEKERQIKKQTALVELVKHKPKATKEQLKAVMDDFAAFVEKCCKADDKETCFAEEGKKLVAASQAALGL

SEQ ID NO: 751 - protein, 646 aa, Homo sapiens
MKWVSFISLLFLFSSAYSRSLDKRDAHKSEVAHRFKDLGEENFKALVLIAFAQYLQQCPFEDHVKLVNEVTEFAKTCVADESAENCDKSLHTLFGDKLCTVATLRETYGEMADCCAKQEPERNECFLQHKDDNPNLPRLVRPEVDVMCTAFHDNEETFLKKYLYEIARRHPYFYAPELLFFAKRYKAAFTECCQAADKAACLLPKLDELRDEGKASSAKQRLKCASLQKFGERAFKAWAVARLSQRFPKAEFAEVSKLVTDLTKVHTECCHGDLLECADDRADLAKYICENQDSISSKLKECCEKPLLEKSHCIAEVENDEMPADLPSLAADFVESKDVCKNYAEAKDVFLGMFLYEYARRHPDYSVVLLLRLAKTYETTLEKCCAAADPHECYAKVFDEFKPLVEEPQNLIKQNCELFEQLGEYKFQNALLVRYTKKVPQVSTPTLVEVSRNLGKVGSKCCKHPEAKRMPCAEDYLSVVLNQLCVLHEKTPVSDRVTKCCTESLVNRRPCFSALEVDETYVPKEFNAETFTFHADICTLSEKERQIKKQTALVELVKHKPKATKEQLKAVMDDFAAFVEKCCKADDKETCFAEEGKKLVAASQAALGLHSQGTFTSDYSKYLDSRRAQDFVQWLMNTKRNRNNIA

SEQ ID NO: 752 - protein, 646 aa, Homo sapiens
MKWVSFISLLFLFSSAYSRSLDKRHSQGTFTSDYSKYLDSRRAQDFVQWLMNTKRNRNNIADAHKSEVAHRFKDLGEENFKALVLIAFAQYLQQCPFEDHVKLVNEVTEFAKTCVADESAENCDKSLHTLFGDKLCTVATLRETYGEMADCCAKQEPERNECFLQHKDDNPNLPRLVRPEVDVMCTAFHDNEETFLKKYLYEIARRHPYFYAPELLFFAKRYKAAFTECCQAADKAACLLPKLDELRDEGKASSAKQRLKCASLQKFGERAFKAWAVARLSQRFPKAEFAEVSKLVTDLTKVHTECCHGDLLECADDRADLAKYICENQDSISSKLKECCEKPLLEKSHCIAEVENDEMPADLPSLAADFVESKDVCKNYAEAKDVFLGMFLYEYARRHPDYSVVLLLRLAKTYETTLEKCCAAADPHECYAKVFDEFKPLVEEPQNLIKQNCELFEQLGEYKFQNALLVRYTKKVPQVSTPTLVEVSRNLGKVGSKCCKHPEAKRMPCAEDYLSVVLNQLCVLHEKTPVSDRVTKCCTESLVNRRPCFSALEVDETYVPKEFNAETFTFHADICTLSEKERQIKKQTALVELVKHKPKATKEQLKAVMDDFAAFVEKCCKADDKETCFAEEGKKLVAASQAALGL

SEQ ID NO: 753 - protein, 636 aa, Homo sapiens
MRPTWAWWLFLVLLLALWAPARGGSSFLSPEHQRVQQRKESKKPPAKLQPRDAHKSEVAHRFKDLGEENFKALVLIAFAQYLQQCPFEDHVKLVNEVTEFAKTCVADESAENCDKSLHTLFGDKLCTVATLRETYGEMADCCAKQEPERNECFLQHKDDNPNLPRLVRPEVDVMCTAFHDNEETFLKKYLYEIARRHPYFYAPELLFFAKRYKAAFTECCQAADKAACLLPKLDELRDEGKASSAKQRLKCASLQKFGERAFKAWAVARLSQRFPKAEFAEVSKLVTDLTKVHTECCHGDLLECADDRADLAKYICENQDSISSKLKECCEKPLLEKSHCIAEVENDEMPADLPSLAADFVESKDVCKNYAEAKDVFLGMFLYEYARRHPDYSVVLLLRLAKTYETTLEKCCAAADPHECYAKVFDEFKPLVEEPQNLIKQNCELFEQLGEYKFQNALLVRYTKKVPQVSTPTLVEVSRNLGKVGSKCCKHPEAKRMPCAEDYLSVVLNQLCVLHEKTPVSDRVTKCCTESLVNRRPCFSALEVDETYVPKEFNAETFTFHADICTLSEKERQIKKQTALVELVKHKPKATKEQLKAVMDDFAAFVEKCCKADDKETCFAEEGKKLVAASQAALGL

SEQ ID NO: 754 - protein, 804 aa, Homo sapiens
MKWVSFISLLFLFSSAYSRSLDKRCSCAPAHPQQHICHSALVIRAKISSEKVVPASADPADTEKMLRYEIKQIKMFKGFEKVKDVQYIYTPFDSSLCGVKLEANSQKQYLLTGQVLSDGKVFIHLCNYIEPWEDLSLVQRESLNHHYHLNCGCQITTCYTVPCTISAPNECLWTDWLLERKLYGYQAQHYVCMKHVDGTCSWYRGHLPLRKEFVDIVQPDAHKSEVAHRFKDLGEENFKALVLIAFAQYLQQCPFEDHVKLVNEVTEFAKTCVADESAENCDKSLHTLFGDKLCTVATLRETYGEMADCCAKQEPERNECFLQHKDDNPNLPRLVRPEVDVMCTAFHDNEETFLKKYLYEIARRHPYFYAPELLFFAKRYKAAFTECCQAADKAACLLPKLDELRDEGKASSAKQRLKCASLQKFGERAFKAWAVARLSQRFPKAEFAEVSKLVTDLTKVHTECCHGDLLECADDRADLAKYICENQDSISSKLKECCEKPLLEKSHCIAEVENDEMPADLPSLAADFVESKDVCKNYAEAKDVFLGMFLYEYARRHPDYSVVLLLRLAKTYETTLEKCCAAADPHECYAKVFDEFKPLVEEPQNLIKQNCELFEQLGEYKFQNALLVRYTKKVPQVSTPTLVEVSRNLGKVGSKCCKHPEAKRMPCAEDYLSVVLNQLCVLHEKTPVSDRVTKCCTESLVNRRPCFSALEVDETYVPKEFNAETFTFHADICTLSEKERQIKKQTALVELVKHKPKATKEQLKAVMDDFAAFVEKCCKADDKETCFAEEGKKLVAASQAALGL

SEQ ID NO: 755 - protein, 804 aa, Homo sapiens [sequence omitted]

SEQ ID NO: 756 - protein, 36 aa, Homo sapiens; identical to SEQ ID NO: 691

SEQ ID NO: 757 - protein, 34 aa, Homo sapiens
IKPEAPGEDASPEELNRYYASLRHYLNLVTRQRY

SEQ ID NO: 758 - protein, 34 aa, Homo sapiens; identical to SEQ ID NO: 757

SEQ ID NO: 759 - protein, 34 aa, Homo sapiens; identical to SEQ ID NO: 757

SEQ ID NO: 760 - protein, 34 aa, Homo sapiens; identical to SEQ ID NO: 757

SEQ ID NO: 761 - protein, 34 aa, Homo sapiens; identical to SEQ ID NO: 757

SEQ ID NO: 762 - protein, 26 aa, Homo sapiens
AHQIYQFTDKDKDNVAPRSKISPQGY

SEQ ID NO: 763 - protein, 37 aa, Homo sapiens; identical to SEQ ID NO: 684

SEQ ID NO: 764 - protein, 37 aa, Homo sapiens; identical to SEQ ID NO: 684

SEQ ID NO: 765 - protein, 28 aa, Homo sapiens
GSSFLSPEHQRVQQRKESKKPPAKLQPR

SEQ ID NO: 766 - protein, 224 aa, Homo sapiens; identical to SEQ ID NO: 689

SEQ ID NO: 767 - protein, 224 aa, Homo sapiens; identical to SEQ ID NO: 689

SEQ ID NO: 768 - DNA, 47 bp, Homo sapiens
ccgccgctcgaggggtgtgtttcgtcgaatcaaacccgaggctcccg

SEQ ID NO: 769 - DNA, 55 bp, Homo sapiens
agtcccatcgatgagcaacctcactcttgtgtgcatcataccgctgccgggtgac

SEQ ID NO: 770 - DNA, 37 bp, Homo sapiens
aggagcgtcgacaaaagaatcaaacccgaggctcccg

SEQ ID NO: 771 - DNA, 58 bp, Homo sapiens
cgcgcatcgatgagcaacctcactcttgtgtgcatcataccgctgccgggtgaccagg

SEQ ID NO: 772 - DNA, 23 bp, Homo sapiens
attccaggagcgtcgacaaaaga

SEQ ID NO: 773 - DNA, 36 bp, Homo sapiens
cgcgcatcgatgagcaacctcactcttgtgtgcatc

SEQ ID NO: 774 - DNA, 23 bp, Homo sapiens
caagtcaagctgccttaggctta

SEQ ID NO: 775 - DNA, 26 bp, Homo sapiens
cagtttaaacggccggccggcgcgcc

SEQ ID NO: 776 - DNA, 39 bp, Homo sapiens
aggagcgtcgacaaaagagcacaccagatctaccagttc

SEQ ID NO: 777 - DNA, 55 bp, Homo sapiens
cgcgcatcgatgagcaacctcactcttgtgtgcatcgtagccctgggggctgatc

SEQ ID NO: 778 - DNA, 60 bp, Homo sapiens
gcccccgcccgcggcggctccagcttcctgagccctgaacaccagagagtccagcagaga

SEQ ID NO: 779 - DNA, 56 bp, Homo sapiens
ctttaaatcgatgagcaacctcactcttgtgtgcatctcggggctgcagcttggct

SEQ ID NO: 780 - protein, 36 aa, Homo sapiens
YPIKPEAPREDASPEELNRYYASLRHYLNLVTRQRY

SEQ ID NO: 781 - protein, 38 aa, Homo sapiens
CSCSSLMDKECVYFCHLDIIWVNTPEHVVPYGLGSPRS

SEQ ID NO: 782 - protein, 21 aa, Homo sapiens
CSCSSLMDKECVYFCHLDIIW

SEQ ID NO: 783 - protein, 24 aa, Homo sapiens
YQPPSTNKNTKSQRRKGSTFEEHK

SEQ ID NO: 784 - protein, 110 aa, Homo sapiens
GPETLCGAELVDALQFVCGDRGFYFNKPTGYGSSSRRAPQTGIVDECCFRSCDLRRLEMYCAPLKPAKSARSVRAQRHTDMPKTQKYQPPSTNKNTKSQRRKGSTFEEHK
